United States Patent Application Publication US 2026/0191916 A1 - sequence listing, part 46

SEQ ID NO: 209 - DNA, 2196563 bp, Streptococcus FBI02176
  source 1..2196563: mol_type = genomic DNA
gtgtcacaagaagagcaattttggtctcgttttttagaattagcccaattacaactaaaagatagtgcctatgatttttttgtcgccgattcaaaattagtcaaaatcgatggagaaacagctaccatttatcttgatggaaattataaagaattattttgggaaaccaatctaaaaaatgctttgatcacagccagctttgaagtctacaatacagatttaaagtttcatttcgtttttgaagataccgaagaaattcctagtagtcatagcggtgagaataggagattatcttcaggtagcttaacaaccgaaccgttacctaaaattgatacaggtctgaaatcaaagtacacctttgataattttgtacaaggggatggaaatatttgggcgaaagcagcagcgcttgcagtttctgaaaatcttgcaacaacttacaaccctctctttatctatggtggaccagggcttggaaagactcacctattgaacgcaattggaaatcaaatcctagaaaatattccaaatgcacgggttaagtatgttccagcagaaacatttattaatgaatttttagaacaccttcgattaggagaaatgaagacgttcaagaatacctatcgaagtcttgatctcttactgatcgatgatatccagtcacttggtgggaagaaagtcacgactcaagaggaattttttaatacctttaatgccctccatagcgacaacaaacagattgttctaacaagcgatcgaagtccggatcatttagatagtcttgaagagcggctggttactcgtttcaaatggggactaacgcaaaatataacaccacctgattttgaaactcggattgctatcttacggaataaaattgaagatctagactatatttttcctaatgacacactagaatatctagctggtcagtttgattcaaatgtccgagacttagaaggtgccttaaatgatatttctttaatggcgaaggtgaaaaaactaaaagaaattacgatcgatgttgcagctgaagctattcgagctcgtaaaaacgataatagcaagacgcttgtcatccccattgaaaaaattcaggaagcagttggagccttttatggagtcagtgtaaaagaaatcaaaggttctcgaagagttcagaatattgtcctagcacgacaagtggccatgtatctttcaagagagatgacggacaactcacttcctcgaatcggaaaagaattcggtgggaaagaccatacgactgtcattcatgcctatgaaaaaattaaaagtatggtcgacacagatgataatctacgactcgaaattcaaagtatcaagaaaaagttaaattaatctgtggataacttcctctaaacttctaggggttatgcacaatttttaaacaagtaacttttcaagtcatagacaggattctgagagttttccacaacttccacacaatctactattactattaacttactaatcataaaataaataaaaggaatgaccatgataaatttttctattaacaaaactttatttttacaagcattaaatactaccaaaagagcgatcagttcaaaaaatgctatcccaatcctttccacgattaaaattgatgtcactccagaaggagttgccttatctggatcgaatggccaaatttcaattgaaaactttatttctatcaaagatgaaaatgctggtttattggtgacctctccaggctctattttattggaagcaactttctttattaatgtggtttcaagtttaccagatgttactttagattttaaagagattgaacaaaaacaggttcttttaacaagtggaaaatcagaaattacacttaaaggaaaagatgcagatcaatatccacgtattcaagaaattgctgcaagtaatccattagttttggaaacaaaattattaaaacaattaattaatgaaacagcatttgcagcaagtgtacaagaaagtcgtccaattttgacaggtgttcactttgttttatcggataataaagagctaaaaacagtagcaacagactctcaccgtatgagtcaaaaagtgattacactggagaaaaatggagacaactttgatgttgtcatcccaagtcgctctcttcgtgaattcacctctgttttttctgatgatattgaaacagttgaggttttctttgctaacaatcaaattctatttagaagtgaacacattagtttttatacccgtttgctagaaggaaattatcctgatacagaccgtctcattccaacagaattcaatacagaggcaaccttcaatgtggctaaccttcgatttgcaatggagcgtgctcgtcttctttcaaatgcgactcaaaacggtacggttaaattagagttcaaaaatggagtggtttcttcccacgttcattcaccagaagttgggcgagtaaatgaagagatcgatacgagcgccgtttcaggagaggatttgtctattagctttaatccaacttatttgatcgaagcgctcaaagctattgatagtgaacaagttgttattcgttttatttcttctgttagaccgtttacattggttccagaaggaaatgaacaagggttcattcaattgattacgccagttcgcacaaattaacaaaggtgaatcatgtatacgttaggtgattttgtagaaatgaaaaagcctcacgcttgtgtgattaaagaaacaggcaagaaggcaaatcgttgggaaattacgcgacttggtgcagacataaaaatcaagtgtagcaattgtgatcatgtggtcatgatgagtcgccatgattttgaacagaaaatgaagaaagtactataaaaggttcagtcacttatgtgaccgaaccttttcgattattttaattcttcaaattttccatttttaacttctttgaaaccaccctgtttcatcatatcaaaagttgatttgaagctgatatagtcgacttttttatctttttgtgtcgttactaatttcttttcaattagctgatctaagtctgccttttcataatttagtgttgttttttcaaccatataatcatctttatattcagcagaatgtgtgaatcctttgacatctttgtattcttcatcatatttatcgatcatttcctttaattgatctttcgtaactcctgcctctttgtaataaatagtagtggtggtttggttactgatcgctttatcacctttatgttctagtgtaatacgaacatctgttttcttttcttggttgattgcctgaagataggatttttgaacagattgttgtccacaagctccaagaagaaagagcgtaaagatagcgattaaagaaagaaaaatagatttccatatttgttttttcatctgaaaaactcctttattcattgttaaatagagtataccatatttatctttttagaacgttacagtttgatgaaaaaatctagtttcaaaggtgatgaaatatttcatttttcatcacttgtcttttgaattatgttataatgaaagagattgaaatttgaacggagaaaaagaaaaatggcattaacagcaggtatcgttgggttaccaaatgttggtaaatcaaccctatttaacgcaattacaaaagcaggagcagaggccgcaaactatccctttgcaaccattgatccaaacgttgggatggtagaagttccagatgaacgcctccaaaaattgacggaaatgattactcctaagaagacagttccgactacttttgaatttacagatattgctgggattgtgaaaggggcttctaagggagaaggacttggtaataaattcttggccaatatccgtgaagtagatgccattgttcatgtggtacgtgcttttgatgatgaaaatgtcatgcgggagcaaggtcgtgaagatgcctttgttgatccactagcagatattgataccatcaatttagaattaattttagccgacttagagtctgtcaataaacgctacgcgcgtgtagaaaaaatcgctcgtacacaaaaagataaggattctgttgcggaatttaatgttctacaaaaaatcaaaccagttcttgaagatggtaaatcagctcggaccattgaattcactgaggaagaacaaaaagtggtgaaaggacttttccttttgactaccaaaccagttctttatgtagcaaatgtggatgaagacgttgttgcagatccagattctatcgagtatgtgaagcaaattcgtgactttgcggcaacagagaacgcggaagtcgtggtgatttctgcgcgtgctgaggaagaaatttctgagctagatgatgcagataaacaagaatttttagaggcaattggcctaacagagtctggagttgataaactcacgcgtgcagcttatcacttgttgggacttggcacttatttcacagctggtgaaaaagaagtgcgtgcttggaccttcaaacgtggcatgaaagctcctcaagctgctggaatcatccactctgattttgaaaaaggatttattcgtgccgtgaccatgtcctatgatgatttagttaaatacggttctgaaaaggctgtaaaagaagcaggacgcttgcgcgaagaaggaaaagaatatgttgtccaagacggggacatcatggaattccgttttaatgtataagagagttaaaaaaatgtaaaggttggaaaaaatatttccaacccttttagtgttttgaaaggaaagagatgacgaaattaattgttggattgggaaatccaggtgataagtattttgaaaccaaacacaatgtaggctttatgttagttgatcaaatggcaaagtctttaaatcttactttctcccatgataaaatttttcaagctgatattgcctcaacatttttaaatggcgaaaaggtctattttgtaaagccaaccactttcatgaatgagagtggaaaagcagtccatgcccttctgacttattatggtctggatattgaagatcttttggttatttacgatgatttagatatggaagttggcaagattcgtcttcgagctaaaggatcagctggaggtcataacggaatcaaatcgattattaatcatattggaactcagactttttatcgaattaagattggaattggaagacctaagcagggcatgtcagttgttcatcatgtcttaggaaaatttgataaagacgattacatcactattctacaaacaattgatcgagtagaagaagcggttaacgattacttggtagaagaaaattttgaaagaagcatgcagaaatacaacgggtaagtagatgaatgtaattgatttagtgagtcaaaactccaaccttctatcctggcaacaaggtttgcaaaaaaacaatagggaattgatcttaggattgtctgcgaccacaaaggctattgtaatggcttcagcctttgattctattgaaaaagcagtcctcatcacttccagttataacgaagcagaacgattggccagtgattttattgccttacttggagaagagaaagtccatacatttttgggagatgataaccctttagcagaatttatttttgcttcacaagaaaggcaatttgcacgattagaggctttgaactttttatgccaagaagatcgtcaaggcatccttgtgaccaatgtgagtggtatcaaactactgttaccttctcctaaagtttttgcatctagcatttttcaattgaaggttggtcaagaaatagacttaactactctgagtgaaacattacagaaaattggctatcaaaaagtgggccaggttttgcaacaaggtgagtttagtctacgaggagatattttagatatctttgagatcgaccaactccaaccctatcggattgaatttttcggagatgagattgatgggatccgaatctttgacccagaaagccagcgttctgttgaaaatgtcgaagaagttcaactcaaagcagtgagtgatctattattgcaagaggaagatttcatccgtggtcagaagcaaatcgaacaattgcaagaacagagcgcgaatgaagaatttaaatcttatctagcagaaattctaggagatatttctcaaagaaaactccatccagatcttagaaaatttattagtttcttttatgagaagcaatatacattatttgattatctccctaaacacactcctatttttctggatgattatcaaaaaatagccgatcaaatagcgagatttgaactagatacagctaatttcttgacggaagatttacataaaaatagagcttcttctcgccaagtgtattttgcagacaccagtacaacattacgaaaatatacgcctgcaacttatttttcaaactttcaaaaaggattgggaaatctgaaatttgatcatttgtatcaattcaaccaatatcccatgcaggagttttttggacaatttgatttactaaaagaggaaattgaacggtatcgaaaatcaaactatacggttattgtccaagcaacttctcatcacaatcttcagcaactccataaaaatttagaagagtatggaattcgattagattatattgatggggatgcgattattcctcaagctagtcaattaattgttggaggactggctcacggtttccaatttgttgatgaaaaaattgtctatattacagaatcagagatttatcagaaaaagatcaaacgaaagattcgtaggcaaaatatttccaatgcagaacgcctaaaaaattataatgaactggaaaaaggggactacgttgttcaccaagttcatggtattggtcaatatttgggaattgaaacgattgaaatttcgggtgtccatcgtgattatgtctccattcaatatcaaaatggagatcgcatctcgattcctgtcgatcagattcagatgttgtccaaatacgttgcaagtgatggaaaaacgccaaaaattaacaagttaaatgatgggcgtttccaaaaaacgaagcaaaaggttcagacccaggtggaggatattgcggatgatttgataaaactctatgcagagcgtagtcaattagaaggttttgcttattcttcagatgatgaaaatcaagaagcttttgaacaagattttccatatattgaaacagatgatcagttgcgctccattgaagaaatcaaaaaagatatggaatcgaatcgtccgatggaccgactgctggttggagacgtcggttttgggaaaacagaggttgctatgcgagcagcctttaaggcagtaaatgatcataaacaagtagcagtgctggttcctacgactgttcttgcccaacaacattatgccaattttaaggagcgttttgaagcttttgcggtagaagttgctgttttaagtcgtttccagagtaaagcagagcagaaggaaacgcttgaaaaattgaaaaaaggacgagtggacattattattggaactcaccggttattgtctaaagatgtcgtcttttcagacttgggcttgattgtgatcgatgaagagcaacgttttggagtaaagcacaaagaaacattgaaagaattgaaaaaaaaggtggatgtgcttaccttgacagctacccctattcctcggacgctccatatgtctatgttaggaattcgagatttgtctgtcattgaaacacctccaactaatcggtatcctgtgcaaacttttgtactagagaccaacccaactattattcgagatgctgtgttgcgggagatagatcgtggaggtcaagtgtactatctttacaataaggtagatacgattgagcaaaaagtatccgagttaaaagagttgattccagaggcttcgattggctttgttcatggccaaatgagtgaagttcgcctggaaaataccttgttggatttcattaatggcgaatacgatgtcttagtgacgacaaccattattgagacaggtgtggatattccaaatgccaatacactctttattgaaaatgcagatcatatgggactttcaactctttatcaactaagaggtcgtgtgggacgaagcaaccgaatcgcttatgcttatttgatgtatcgtccagacaaatctcttacagaagtgtctgaaaaacgtttagaagctattaaaggttttactgagttggggtctggatttaaaattgctatgcgagatctatcgatccgtggagcagggaatatccttggagcttctcaatctggtttcatcgattcagttggttttgaaatgtattctcaattgttagaagaagctattgctaagaaacaaggccaagagcatcgcaggcaaaagagtaatgcagagttgaaccttcaaatagatgcgtatttacctaatgaatatatttcagatcaacgtcaaaaaattgaaatttacaaacaaattcgtgaaatgaattctgcgacggactatgaatacttgcaagatgaattgatcgatcgttttggagaatacccagatgttgtcgcctacctacttgaaattggtttagtgaaagcttacttggatcaagtctttgtccgtcttgttgagagaaaacaacaaaaagtgacagtgaaatttgaacctattgccaaacaactgtttttaacacaggattatttcaaagctctgtcaatgacacagttaaaggcacagattgcagaggaaaaaggattgattgaagtgatcttcgatattcgaaataagaaagattttgaaattttagaagctctgaagcaatttggtcaaaccttattggaaattaaacaggaaaaagaaaaggactagcagttcttagctcatttttcgcattttatgtataaaaaatgatacaatactatgttagaggtgacagtatgagattagataaatatttaaaagtttctcgcattattaagcgtcgtcctgttgcaaaggaagttgcagataaaggacgaatcaaagtcaatggagtattagccaaaagttcaacggatttgaaagtgaatgatcaaattgaagttcgttttggaaataaagtattgacggttaaagtcttggaaatgttggatagtacaaaaaaagaagatgcatccaaaatgtacgaaataattagtgaaacaaggatagaagaagatgcctaaaaatatcgttcaaatgaacaataaatatatcaaagacgaaagtcagcgaaaacgttttttagaagaagaaagaaaaaaacgcaatcgttttctagggctcgttttgatattggtcatgttactgtttattcttccaacttataatttagcccagagctatcaatcgctacaagataaaaaagaacaatacaaacagttggaaaaagagtataaagaaacaagtgaacaaaaagaataccaacaagatatcgctaaaaaattaaaagacgatgattatgcaacaaaatatgcacgcgctaagtattctttttcaaaagatggtgaatatgtttataccatcccagatttactcccccaataaccgatggaaaatatcttacaaacagttaaacaatttcttgaattttcggatgaaaaattagaggaattaaaaaagaaaaaccaaatgatcaaacttcaaaaggatgaaaaggaaaggaatacaggtgtctaaacgatttctgctcctattgttagttccaattttatttattgggtctcaagcagcgagtatcgagcagtctgagtcttctcagacaatggctcatccatcagaactttatttttcttcaattccagcgaaccctaatgtctatcgcaaaatttctgttttttctgatcctcagttgaaaaaagcaaaaggagaaattcttcccaacacaccgtttacaatcgaacaactctttgtaaatgatgaagggaaagctgtatttaaaatagcagataaaggatatgtattagcagattcttctgtcattttttctgatgttgtacaagaaacacaagaaaaaaaacaagacatgtggctaaaacctggttttaaagtgtacgaccgccccttaataaatggtgcacaagaaaaaaatacacctctttctccttatacaaaagtgacagtcttacgtacagctaagactttacgagatgagtttgtggagattgaaggtcagggctgggtgaacaaagcattcgtcactgaaaaagataatcgaatggaaaaagtccaggacttgttaaatagtaaatacaattctccttcgtatggaatctatgtaaaacaattagagactggaaatactgctggaatcaatccgcaaaaagaaatgtattctgccagtgtaacgaaattaccatacttgtactacgtccaagaacagctcaataaaaaagccatttttccaactacaacctacaaatatattccagaagtcaatgatttcaaaggtggctatgaaccagaaggaagtggtagcctttcaaaaacagcagatggaaaagaatatagtgttcaagagttggtagataaaattgcaaaagaatccgataatgttggacataatatcttgaattattatgtcactcatcaatcagatcaagacttccaaaaaactttggataaaattgcaaagaaacattgggatgttgaaaaaagagaagcatccgctgaaatggctggcaatgtcatggaggctgtctatcaacaaaatggcccgattattgatgcactctcctctacaaaatatgatgatcaacggattgcgcgtgaccttccagtaaaagttgctcataaaatcggagatgcctatgattttagacatgatgttgcgattgtatacacaaattcaccctatgtaatagccatttttacagatcattcgaattatgatacgatttccaacatttcaaaggatatctatgaggtattgaaataatggaaaagcgatttttagagttttgtgaaaaacaagatctatttactccccatcgccgtgttttagttgccttatctggtggattggattcaatgaatctgtatgaacttttatataagaataaagaacgattgaaaatccatctggtactcgctcatatcaatcatggacaaagaccagaatcagatttagaagaaagtgaacttcgaacgctagctgataggcgagagacacgtattcatgtggctcactattcgggtgattttacggaagcaaaagctcgtacctttcgttatgatttttttaaacagattatggagaaagaggattgcactgctttagtaacaggtcatcatgcaaacgatcaagctgaaacaactttcatgcgcttgatacgaggaacaaaattacgccatttaagtggcattcctgtacgccaaccatttggcaagggtgagctaatccgtcctttgttaacttttaccaaagatgagttgatggaaatccctcactttgaagacagtagcaatgactcacaggactattttcgaaatcgtgtacgccatcaataccttccagaatttgaaaaagaaaatcctaaaatgcaagcaagtcttcgctatttagcagaggaagtgaatcattggcaccaagccctgaaagaattgactagcgagttaaccattcaagatttagcttcttttagaacgtattctcattctgtacaatcattcttattagaagagtatttggcccaatttccagatttgcaacttggtagggtacagtttcaagaattattaaatttactgcgaaaaaaaagaaattgcgtccattatttaaagtcgaattatgaactacatcaggaatatgatttctttgaaatacaaaaaatcagtcaaaagtcggatgaccagcccctcccatttttgttagaatttgggaatatctttgaaattgcaaattataaactatcttttggacaaccattagtaggggaaaatgtagaaattctttctgtttcacgcgaaactcccatcttaattagaaggagaaaggaaggagatcagctgcttgttaatggccaccatcaaaaattaagacggtggtttatcaaccataaaattccaatttctcttcggcaaaaggctctcattatagaacaaaatcataatattctttctgtagtgggattggtaacgagtgatttgagtaagctctcaaaaagtggtataataaaagatagtctttatattcaaaaaatagataggtaaaaacatgttagaaaaagatataaaaaaagtattggtttcacatgatgaaattgtagaagcagcaaagaaattgggtgaaaccctaacaaaagagtaccaaggaaaaaatccaatttttgttggaattttgaaaggctctgttccatttatggcagagttgatcaaccacgtggatacacatattgaattggattttatgctggtttcaagttatcatggtggtacagaaagctcaggtatcattaatattatcaaggatatcgaccaagatattactggtagagatattttatttgtagaagatattatcgatacaggtaaaactctcaagagtctaaaagaactctttgaagaacgaaatgcaggatctgtgaagattgctaccttactggataaacctgaaggacgtttggttgagattgaagcagattatacctgctttacgattccaaatgagtttgttgtaggatatggtttagactatgatgaaaattatcgtaacctaccctatgttggtgtattaaaagaggaagtgtactcaaaatagaggagactagatgaataacagaaaaaataacggttttgttcgaaatccatttctgtatttgttgattattgtagcggctgtgacagggttccagtacttttttgcgggtaatggagttggtcaaagtcagcaaatcaactacacagaattggtcaaagaaattaaaaatgataatgtaaaaacgatcagttaccaaccaaatggtagtgtgattgaaattgcagggacctataataaagctaaagaatcaaaagatgatacaggaattcaattttttaccccaagtgttcaaaaagtatctcgctttactagtgtcatccttccatctgacatcactgtcaatgaattacaaaaattagcagctgaccacaaagcggaaatcactatcaaacgtgaaagctcaagtggcatgtggataaccattctgacttcaattgttccatttgttatcgtcatgttcttcttcttctcaatgatgaaccaaggcggtggcggaggtgcccgcggtgccatgaactttggtcgtaataaagcccgcgctgctaataaagaagatattaaagttcgtttttcagatgtagcaggagctgaagaagaaaaacaagaacttgttgaagttgttgaatttttaaaagatccaaaacgctttactaaattgggtgcaagaatcccagcaggtgtgcttcttgaaggccctcccggaactggtaaaacccttttagcaaaagcagtagctggtgaagctggagtgccattcttcagtatttctggttctgacttcgttgaaatgtttgtcggagtcggcgctagccgggttcgttcactttttgaagatgctaaaaaagcagcaccagccattatctttatcgatgaaattgatgctgttgggcgccaacgtggtgtaggtcttggtggcggaaatgatgaacgtgaacaaacccttaaccagctcttgattgagatggatggttttgaaggcaacgaaggaatcattgttatcgcagcaactaaccgttctgatgtccttgaccctgcccttcttcgtcctggccgttttgaccgtaaagtattggttggacgtccagatgtgaaaggtcgtgaggcaattcttcgtgttcatgctaagaataagccacttgctcaagatgtggacttgaaattggttgctcaacaaacaccaggatttgtcggtgctgatctcgaaaatgttttgaacgaagcagccttggttgcagctcgtcgaaataaaaaagtaattgatgctgctgatatcgatgaagcagaagatcgtgttattgcaggtccatctaagaaagatcggacgatttcacaaaaagaacgtgaaatggttgcttatcacgaagctggtcatacaatcgttggtctggtcttatcaaatgctcgtgtagttcataaagttacgattgttccacgtggtcgtgcaggcggttacatgattgcccttcctaaagaagatcaaatgttactttctaaagaagatatgaaagaacaattagctgggctcatgggaggacgtgttgccgaagaaattattttcaattcgcaaacaacgggtgcttcaaatgactttgaacaagctacccaaatggcgcgtgcaatggtgacagaatatggtatgagtgaaaaacttggaccggtccaatatgaaggaaatcatgcaatgtttggtgctcaaagtccacaaaaaatgatttcagaacgaacagcttacgaaattgatgaagaagttcgtagtctgttgaatgaagcccgtaataaagcggcagaaattattcaaggaaatagagaaacgcataaattaattgcggaagctctattaaaatatgaaaccttggatagtgttcaaattaaatcattatatgaaacaggaaaaatgcctgaaaattcagagcatgaattagaagaagaagcaaaacctctatcatatgatgagattaagtcaaaattagaagaaaataactaattcaaaagaaggaaaatatttccttcttttttattaaaaaagtgttgacagagtaaaaatattctgtataatagaatatgttgtaaaaatggtccgttggtcaaggggttaagacaccgccttttcacggcggtaacacgggttcgaatcccgtacggactatcgataaactgtcaccaagtggcagttttttttgtgtatttgaacaaaatagtcaaaaataataaccaaatagttaaaaaaacgtgcagaatagaaaaaaagtccaatgagcttctttatttttataaaatacagataaaagtaaaggagagcttatggaatttaataaaatgtatcaaaaagtaaaatatatcgtaagaaaatgtgaaaaagagtattatattcaattatgggaaaaggatgattgggaacaagaaggtcagctaactctgtttgaactttatcaaaaaaatcctgaaattgaaacaaatgaagaattactttatacatatttcaaaacaaaatttagaaatcatattaaagataaaataagacaacaggaaagtgataagagaaaaattaatagacttccatatattgaaattggagaaattagtcacagaatttcatcaagaaaaatatatttagatgagctggttgttctgagagatgcattaaaacgttttaaagaaaaattaacagtaaaagaaaaagaacaatatgaagcattactagcaaacagaagatgtctaggaaaaacaaaaatgaaaaagaaattagagaactatctaaaggattttaaaaattcaatttaagaactgaaagttgacagtgtataaatgaactttcaaaaaaataaaattttttgagaaaaagtattgacagtaaggtaaggtcatgatatactaatatagttgtcgcgcgagagcgacaaagacctttgaaaactgaacaagacgaaccaatgtgcagggcgctataactaaggttatagtaactgaacaataaaaaaacaataaatctgtcagtgacagaatgagtttaagacaaacaattattttaatgagagtttgatcctggctcaggatgaacgctggcggcgtgcctaatacatgcaagtagaacgctgaagcttggtgcttgcaccgagcggatgagttgcgaacgggtgagtaacgcgtaggtaacctgcctcttagcgggggataactattggaaacgatagctaataccgcataaaagtcgatatcgcatgatattgatttgaaaggtgcaattgcatcactaagagatggacctgcgttgtattagctagttggtgaggtaacggctcaccaaggcaacgatacatagccgacctgagagggtgatcggccacactgggactgagacacggcccagactcctacgggaggcagcagtagggaatcttcggcaatgggggcaaccctgaccgagcaacgccgcgtgagtgaagaaggttttcggatcgtaaagctctgttgtaagagaagaacgagtgtgagagtggaaagttcacactgtgacggtaacttaccagaaagggacggctaactacgtgccagcagccgcggtaatacgtaggtcccgagcgttatccggatttattgggcgtaaagcgagcgcaggcggttagataagtctgaagttaaaggctgtggcttaaccatagtacgctttggaaactgtttaacttgagtgcagaaggggagagtggaattccatgtgtagcggtgaaatgcgtagatatatggaggaacaccggtggcgaaagcggctctctggtctgtaactgacgctgaggctcgaaagcgtggggagcaaacaggattagataccctggtagtccacgccgtaaacgatgagtgctaggtgttgggtcctttccgggactcagtgccgcagctaacgcattaagcactccgcctggggagtacgaccgcaaggttgaaactcaaaggaattgacgggggcccgcacaagcggtggagcatgtggtttaattcgaagcaacgcgaagaaccttaccaggtcttgacatccctctgaccgctctagagatagagttttccttcgggacagaggtgacaggtggtgcatggttgtcgtcagctcgtgtcgtgagatgttgggttaagtcccgcaacgagcgcaacccctattgttagttgccatcattcagttgggcactctagcgagactgccggtaataaaccggaggaaggtggggatgacgtcaaatcatcatgccccttatgacctgggctacacacgtgctacaatggctggtacaacgagtcgcgagtcggtgacggcaagctaatctcttaaagccagtctcagttcggattgtaggctgcaactcgcctacatgaagtcggaatcgctagtaatcgcggatcagcacgccgcggtgaatacgttcccgggccttgtacacaccgcccgtcacaccacgagagtttgtaacacccgaagtcggtgaggtaaccatttggagccagccgcctaaggtgggatagatgattggggtgaagtcgtaacaaggtagccgtatcggaaggtgcggctggatcacctcctttctaaggaaatggaaacctgtacgttggtcttgtttagttttgagaggtcttgtggggccttagctcagctgggagagcgcctgctttgcacgcaggaggtcagcggttcgatcccgctaggctccattaacactttagtagtgttaagtttgaacattgaaaattgaatatctatatcaaatagtaacaagaaaaataaaccgaaacgctgtaaatatttaaagagtttaggtcgtaagaccaaaaataaggttaagttaataagggcgcacggtggatgccttggcactagaagccgaagaaggacgtgacaaacgacgaaatgctttggggagctgtaagtaagcgacgatccagagatgtccgaatgggggaacccactagctaatggctagtactcctatctgttaaggataggtagaggaagacgcagtgaactgaaacatctaagtagctgtaggaagagaaagcaaaagcgattgcctgagtagcggcgagcgaaacggcaggagggcaaaccgaagagtttactcttcggggttgtaggactgcaatgtggacttaaagagtatagaagaatgacatgggaaggtcagccaaagagagtaagagcctcgtattcgaaatagtctttatacctagcagtatcctgagtacggcgggacacgagaaatcccgtcggaatctgggaggaccatctcccaaccctaaatactctctagtgaccgatagtgaaccagtaccgtgagggaaaggtgaaaagcaccccgggaggggagtgaaatagaacctgaaaccgtgtgcctacaacaagttcgagcccgttaatgggtgagagcgtgccttttgtagaatgaaccggcgagttacgatatgatgcgaggttaagttgaagagacggagccgtagggaaaccgagtctgaatagggcgcattagtattatgtcgtagacccgaaaccatgtgacctacccatgagcaggttgaaggtgaggtaaaactcactggaggaccgaaccagggcacgttgaaaagtgcttggatgacttgtgggtagcggagaaattccaaacgaacttggagatagctggttctctccgaaatagctttagggctagcgtcgacattgagattcttggaggtagagcactgtttgggtgaggggtccatcccggattaccaatctcagataaactccgaatgccaatgaattatggtcggcagtcagactgcgagtgctaagatccgtagtcgaaagggaaacagcccagaccaccagctaaggtcccaaaataattgttaagtggaaaaggatgtggggttgcacagacaactaggatgttagcttagaagcagctattcattcaaagagtgcgtaatagctcactagtcgagtgaccctgcgccgaaaatgtaccggggctaaaacaatttaccgaagctgtggatacctttataggtatggtaggagagcgttctatgtgtggagaaggtgtaccgtgaggagcgctggaacgcatagaagtgagaatgccggtatgagtagcgaaagacaggtgagaatcctgtccaccgtaagactaaggtttccaggggaaggctcgtccgccctgggttagtcgggacctaaggagagaccgaaaggtgtatccgatggacaacaggttgatattcctgtactagagtatgtagtgaaggagggacgcagtaggctaactaaagcgtgcgactggaagtgcacgtctaagcagtgaggtgtgaattgagttaaatgcttaattctataacattgagctgtgatggggagcgaagtttagtagcgaagttagtgacgtcacactgccaagaaaagcttctagcgtttaaacatactctacccgtaccgcaaaccgacacaggtagtcgaggcgagtagcctcaggtgagcgagagaactctcgttaaggaactcggcaaaatgaccccgtaacttcgggagaaggggtgctggctttcagtcagccgcagtgaataggcccaagcaactgtttatcaaaaacacagctctctgctaaatcgtaagatgatgtatagggggtgacgcctgcccggtgctggaaggttaagaggagtgcttagcgtaagcgaaggtatgaattgaagccccagtaaacggcggccgtaactataacggtcctaaggtagcgaaattccttgtcgggtaagttccgacccgcacgaaaggcgtaatgatttgggcactgtctcaacgagagactcggtgaaattttagtacctgtgaagatgcaggttacccgcgacaggacggaaagaccccatggagctttactgcagtttgatattgagtgtctgtgccacatgtacaggataggtaggagccattgagatcgggacgccagtttcgatggaggcgttgttgggatactacccttgtgttatggccactctaacccggtaggttcatcatctacggagacagtgtctgacgggcagtttgactggggcggtcgcctcctaaaaggtaacggaggcgcccaaaggttccctcagaatggttggaaatcattcgcagagtgtaaaggtataagggagcttgactgcgagagctacaactcgagcagggacgaaagtcgggcttagtgatccggtggttccgtatggaagggccatcgctcaacggataaaagctaccctggggataacaggcttatctcccccaagagttcacatcgacggggaggtttggcacctcgatgtcggctcgtcgcatcctggggctgtagtcggtcccaagggttgggctgttcgcccattaaagcggcacgcgagctgggttcagaacgtcgtgagacagttcggtccctatccgtcgcgggcgtaggaaatttgagaggatctgctcctagtacgagaggaccagagtggacttaccgctggtgtaccagttgtctcgccagaggcatcgctgggtagctatgtagggaagggataaacgctgaaagcatctaagtgtgaaacccacctcaagatgagatttcccatgattttatatcagtaagagccctgagagaagatcaggtagataggttaggagtggaagttgtgtgagcaatggagcggactaatactaatagctcgaggacttatccaaagagtcagaagatattgacaacgtgagtttaacttgttagaatatagatgttcaattttgaatgtttaatcattcagagttaagtgacgatagcctaggagatacacctgtacccatgccgaacacagcagttaagccctagaacgccggaagtagttgggggttgccccctgtgagataaggtagtcgcttagcaagagattgagcctagtagatactaggctcatttgggagtttagctcagctgggagagcatctgccttacaagcagagggtcagcggttcgatcccgttaactcccataggtcccgtagtgtagcggttatcacgtcgccctgtcacggcgaagatcgcgggttcgattcccgtcgggaccgttaagataatgaaaattattttaagactcgttagctcagttggtagagcaattgacttttaatcaatgggtcactggttcgagcccagtacgggtcatattttgcgggtttggcggaattggcagacgcaccagatttaggatctggcgctttacggcgtgggggttcaagtcccttaacccgcataagagaataataatgagccggcttagctcagttggtagagcatctgatttgtaatcagagggtcgcgtgttcaagtcatgtagccggcatttttttatataaagaaagcaatgcgaacgtagttcagtggtagaacaccaccttgccaaggtgggggtcgcgggttcgaatcccgtcgttcgcttgaggaggccggggtggcggaactggcagacgcacaggacttaaaatcctgcgattggtaacgatcgtaccggttcgattccggtcctcggcatagatttaggttggagaagaagcacccttagctcaactggatagagtacctgactacgaatcaggcggttagaggttcgactcctctagggtgcatggtcgcaaggctatgtagtaattgaataggaacgagcacccttagctcaactggatagagtacctgactacgaatcaggcggttagaggttcgactcctctagggtgcataaagcggtagctttagatcgggaagtagctcagcttggtagagtacttggtttgggaccaaggtgtcgcaggttcgaatcctgtcttcccgatattatggcggtgtagctcagctggctagagcgtccggttcatacccgggaggtcgggggttcgatccccttcgccgctatattgttgatcttgttggacctttagctcagctggttagagctctcggctcataaccgagtggtcgtaggttcaagtcctacaaggtccattgttattttggaggattacccaagtccggctgaagggaacggtcttgaaaaccgtcaggcgtgtaaaagcgtgcgtgggttcgaatcccacatcctccttaatattaacgcgggatggagcagctcggtagctcgtcgggctcataacccgaaggtcgtaggttcaaatcctgctcccgcaatttggctcggtagctcagttggtagagcaatggattgaagctccatgtgtcggcggttcgattccgtctcgcgccatttcttttaataataagcgggtgtagtttagtggtaaaactacagccttccaagctgttgtcgcgagttcgattctcgtcacccgctttgaacataggttctttaccaagtttttaacttgggcgcgtagctcaggtggttagagcgcacgcctgataagcgtgaggtcggtggttcgagtccactcgtgcccattttggagaattactcaagaggctgaagaggacggtttgctaaatcgttaggtcgggtaaccggcgcgggggttcgaatcccccattctccgtataatttccaagtttgagatgtcatctcaaactattttttatattttgaaggttttgtctatgttcttgaatcgattctttaaaatttttagttttgtgtttgttttaactgtttcaggaattttatttctttttccatctgttagaacttcgattgttttaaaatcttctgatatatttgctattgttgataaggcagtatcggtaccatttgttgttgtggaatctaaggcaaaagatttaaagaatttatctgaattaaatgatgaaaaccgttcgttaaaatcacgtctttatcaaaaggatattgaccagtcaaaacttaaccgtttggaatcagaaaatagagaattaaaggatttgatgtcaatcaagaattctgtatcgggttctaaacaagtcgttagtgagattattgaccgtaattatggttcgtgggatcaggaatttgttattgataaaggtagttcagatggaatttctgattctatgtttgttctttcgtctggtggcgtcattggtgtggtagaaagtatagagaaaaattctagcaaagtgaaattattagtcgaagatactatttcttcacaacacctgacgtttaaaattgagagtcaaggtcaatctatttttgctttattaaatggttatgacgagaagacgggtgagtttcggttgttgcaaattggagatccagttgaaattaaaaaaggatctctggtttcaacaagtggtttaggaaaatataagagtagtgacttacctcttggtacagtgacttctactcaaaaggcatctgatcagttagggcaagaaattcgtgtgaaaccaaaggctaatttagatgtcaatcgttatgtactattgattggagagtagtgtgaaagtcatacgtaagtaccattttttccctttaatcttattcttatctttatttgttgacgggcagatctcttttcttatttctcgtttctgtccaaactcctttgaacctacttcatttttatttctatatggttttatgttattgagtctctatttctctgagatagctagtatttggtggggagtcttctttggtttttgttttgatgtgtattttttacacactctaggaattgcattcatagtatttcctatactacaggtgattttttatcggtgtaatcagattattttggtcaatcgattgactcgtttttttacatttttattaacgattctgttgtttcagattttaacaaatcttctgttgattctttttgtcggtataaaatttaactggatcacactaattatttaccaaattgcccctagtttaattttgaatgtgcttctattaatagtattacagcctttacttgaaaagatttatttataaactcgaaataaaaatgtaacaatagcgtaatataaatttttaaaaaatttgttatactagttagtgtcttattagaaagggaaaatttatctaatgaagaaaaaattatttgccacaatcttattgagtacagttgctttatcacaaggtgctgtcgtagctggtgtatcagctgattcaacagatgataagattgctgctcaagataacaaaatcaatagtattaatcaacaacaacaaagcgcacaagctcaggtagatcaaattcaaggtcaagtatctgaaattaaaaaacaacaagaaaatcttcaagctgaaaatgatcgtttgaatgaagaatctgaacgattgtcagctgagatcgatgagttgtcaaaaaatattgttgctcgtcaagaatcacttgcaaatcaagcacgtagtgctcaaacaactgggactgcaacaagctatattaatgcgattgttagctctggatctttgacagaagctatctcacgtatttctgctatgaatgaaattgcagatgctaacaacaaaatgttgcaagagcaaaaacgtgataaagaagatattgcacaaaaacaaaaagaaaacaacgacgcaatcaacactgttattgcaaacaaacagcaattagaagatgatgcgcaagctttgtcaactaaagaagctgagttgaaagtagcacaattgaacttggctgctgaaaaatcaactgctgaaaacgaaaagaatgctttgttgcaacaaaaagctgaagctgaaaaagcagcagctgcagcagcagctgctgaagcagcttaccgtgcaaaacaaaaagaacaacaagcagctgtaaaagcttctgctaatacaactcttcaagcacaagttcaggcagcggctcaaacacctgctgcaacaccagcggcagcacaaactcaagcagcacctcaacctgctgttcaaactcaagcagcggctgcaccagtagcaactacttctcgtccaacttatagtacatctgcatcatcttatccagttggtgaatgtacatggggtgcgaagacattggctccatgggctggtgattactggggtaatggtggacaatgggcagcaagtgcagcggcagcaggattccgtacaggatctcaaccacaagttggtgccattgcatgttggaatgatggtggatatggacacgtagcagttgttacagccgttcaatctacaacaagcatccaagtttctgagtctaactataatggtatccgtagtattggtaactaccgtggttggtttaacccaacaacagcacaaggtactgttacttatatctatccaaactaagaattatactgaagcagaacatttgttctgcttcttttttgatagaatttaggtagtgatagattttgtaatttccataaattaatatttgaatatttgcttaaaaagcgataaaatgattacaggagaaatttgtgctgactgtacaatatggttttagattttactggaggaaatcatgtcattttctgatttaatgctctttgctttgtcgtcaaatcaagaattggctcaacgtgtgtctcgtgaaatgggactaccgcttggaaagtcaacggttcgtcaattttctgatggagaaattcaggttaatattgaagaatcaatccgtgggaaagatgtttatattttgcaatccactagctcgccggttaacgataatctaatggaaattttgattatggtagatgcgttgaaacgtgctagtgctcaatccattaatgtggtgatgccatattacggctatgctcgtcaagaccggaaagctagagctcgtgaaccaatcacttctaagttggtagccaatatgcttgaggttgctggagttgatcgtctgttgacaattgatttgcacgccgcacaaattcaaggtttctttgatattcctgttgaccacttgatgggtgcgcctttgatcgccgactattttgaacgtcgcgggatgattgggaaagattatgttgttgtcagtccagaccatggtggtgtgactcgtgctcggaaattagctgaatttttgaagacaccgattgcgattattgataaacgtcgaagtgtcgataagatgaatacgagtgaagtgatgaatatcattgggagtgttgaaggcaagacttgtattttgattgatgatatgattgatacagctggtacaatctgtcatgccgcggatgcccttgcagaagcaggtgctgttgaagtttatgcaagctgtactcaccctgttttatcaggaccagctatggacaacatccaaaaatcagccattaagaagttggtggtgttggatacgatttatctaccggaagatcgattaattgataagattgagcaaatttcgattgcgaaactccttgcagaggctattgttcgcattcacgaaaatcgccctctttctcctctatttgaaatcggaaatgccaaaaaatgttaacaataaggaggctgggtaactggcctcttttatttaggaggatatacaaatggaaatcagaaaatggttggaaaatctaaaaaaagaaaagaaacggaaaaaactggttcaagcagctaaagaactagaagcaaaggcggatcctagtttgcccaagaaacgattacctaaaaatggggtggtaaaataatagtaattaagcaaaaacataatctatagagaatttttcggcatagattgagtcagtagtgcataacaggaagataatggagaagatataccattaattttttgtgtatcaatttcgtaattttatctttcaaataggtcaaaaccttaaacttttttaaaaaaattaaagaaaaagtcttgacatgggaagaatatcctagtatactagtcatagttacgaagtaacgaataatttttgaaaagaaaaaaggagataaaacaatgaaaaaagttttattatcatcagtagcagctcttgcagtatttgcaacagcagcaccagcttttgcatcagatccacgtacttggacaggttacccaactgataatacagttaaacctgcagcagaaacagataaaggcgacaacaaccgttttggtaacactcctgatgctgttatcgctggtaaaactgaagcaccaatcacaattaaaacagctgatacaaacaaacacgttcgtgtaactgttcttgatggtggtggacgcccagttccaggtgcaactattgacttcatgttgaatggttttgcaatcggttctgctgtaactgaccaaagtggtgatgcagaagctccacgtttgttcaaccaaggtgatgttgtagaataccgtgtaggtactactgctacagactttaaagaacttgtaacagctactggttcagtaacagttactgctgatatgtacactaacggttcagtaacacttccatacaaattggatgaccgtgctgcaacaatcaacacaaactctaaagaagtaaaagcttctgacaacaaccaatctaaagaagaagctaaaaaagctgaaaacaaaggtggagaagcagctaaagctggtaaagcatcttcagctcaagctggtaaagctcttccaaaaacaagcgcagttaaataatttgattattaattagctcgtaaaatatcactggaccttcgggttcagtgttattttttagaaaaaatcatcaagaggagatcaatcaatgaaaagagctggggaaaaaagttcaactaaattgggccttgtgattgctgctcttgttgcagttgttgtgcttgttgctggatttattttctttaatccttttggaggaagcaagtcatctagcacggctaaaaagacaactggaacaagttcaaccaagcaagaaactaaatatgaaccaagtcaagaagaaaaagattatctgaaaaatcgttttgctcagttaacagctgttaaccctgaagcaattgcttatgtctacgcaccgggtactgaattggatgaacctgtcgtacaaactactgataatgaaacttatttgaataagacgtttgatggtgggaatgagccatacatgggaacagtcttcatggatatggacaacaagaaagacttcagtgatcgtttgacttggctgtttggtcatgctcgtggtagtaaggtcggcgatcatcgcatgtttaatgatgtcaactactatgacaaacaagagtatttggaccaacatccatatgttgtgattgagacaccagagcggaaatactactatgaagtaatgggcttggttattgtccctgaggatactgctttctaccgtacaagctttaaagatgataaagatttcaccactcagttgaagaatatctatgagtcagctcgtacgaagaatcctaatatcaagatcaaagcatctgataagtatttagtattgtcaacttgtcgtgaagaggatgaaacgattcgttctaacctctaccttcgtcgaattcctgattcagaaatgaaggattttgtggcaaaacatgcggatcaattgaaatatgtggcaacacgtggtcaacaataatggcttgaaagacttagcattgctaagtctttttttcatggaaggatttttgaaatgtcctttggtggtaagcaaaaggtggggatctggcttgttcttttgcgatggggtcctatttatagtataatgaatataagtgttttggaggtgttctatggatttaacgaaacgttttaataaaaatctgaatcggatcgaagtttctttgattcgtcagttcgatcaatcaatttcttccattcctggtgtcttgcgtttgactttgggggaaccggattttacaactcctgaacatgtaaaagaagcaggaaaggctgccattgatgcgaattttagccattacactgggatgagtggtttgctggctttgcgtgaggctgcgagtcagtttgtggctgataaatatggtatttactaccgtcctgaagatgagatattggtgacgatcggtgcgactgaagccctatctgcaaccttgacagcaatcttggaacctggagatgtagtgcttcttccggcaccagcttatcctggttatgaaccgattgtgaatttggttggggcggagattattgaaattgatacgacagcagatcgttttgtcttgactcctgaaaagttggaaaaggccattctagagcagggtgaaaaattgaaggctgttattctcaattatccagctaatccaacgggtgtcacttattcgcgcgaacagatggcagaattagctgctgtcttaaaaaaatatgaagtctttgtgatttgtgatgaagtctattcagagctgacttatactggagaagcgcatgtctctatggcatccttcattcctgagcagaccattgtcattaatggcttatctaagtctcatgccatgacaggctggcggcttggctttatctttgcgcctgctgcattgacggcccaactcatcaagagccatcagtatttggtaacggctgctggaaccatgaaccagtatgctgcgattgaggccttgactgctggtcgggatgatgcggagccgatgaagaaggaatatgtgaagcgtcgcgattatattattgaacagatgtccgcgcttgggtttgagatgattaagccagatggagctttttatatttttgctaaaatcccagctggttataatcaagattcctttgctttcttgcaggattttgcgcgtgaaaaagcggttgctttcattcctggtgctgcttttggtcaatatggtgaaggctatgtgcgtttgtcgtatgcagccagcatggaggttatcaaggaagctatgaaacgcttgaaggagtatatggaagaacatgctggagtcaattgagacccggggaattgtcctgtataatcgggagtttcgtgaggatgacaagctggtcaaaatcttcacagagaagtcagggaagcggatgttttttgtgaaacatgcgggaaaatcacggttgaatcccatgttgcaacctttggtaacggcagatatgttgttgaaaatcaatgatgatgggttgagttatattgatgattttcaagatgtgcagatttataagaaaattaatgcagatctttttgccctttcttatgcgacctatgttctggcgcttgcagatgcaagtattcaggataatcaggtggatccggccctgtttgcttttttggaaaagaccttgtctttgatggaagagggactggattatgaggttttaaccaatatttttgagattcagattctatcacgatttggagttgtcttgaatctgcatgaatgctgtttctgtcatcgggttggtcttccttttgactattccttccggtatagtggggtcctttgtccggatcattatgatcaggatgagagacgcgctcactggcatccaaatgttctctatttattggatcagtttcaagcagtgcgattcagtgatctagagacgatttctctacaagcggagatgaaaacagctctgcgtcaggcaattgatcagttgtatgaggagtatgtagggatccatttaaaagctaaaaagtttatcgattccttgagtgattggggagcgattatgaaagattcatctggaggtgaaacatgaaaaaaattgcagtagatgcaatggggggcgataatgcacctcaagccttggtagaaggtgtgaatcaagctattcgtgattttgatgatattgagattgtcttgtatggtgatgaggcaaaaattaaaaactatttaaccgctacagagcgtgtatcaattgttcatacggaggaaaaaatcgattcagatgatgagccggcacgtgctattcgtcggaagaaacaggcctctatggtcttggctgccaaggatgtgaaggctggtgaggtcgatgccatgctttctgcagggaatacaggtgctttgttggcagcaggcttctttattgttggccgtattaaaggggtggaacgccctggattgatgtccacacttccgacagttgatggtcgcgggtatgacatgttggacttaggtgccaatgcggaaaatacaccagagcacttgcatcagtatgctgtgatggggtcttactatgcggaaaacgttcgtgggattcaaaaaccgcgcgtgggtctattgaacaatgggacagaagctagtaagggagatcctttgcgcaaggaaacctaccaattgttatctgaggatgagtcgattcattttgttggaaacgtggaagcgcgtgacttgatggatggcgttgctgatgtcgttgtggcggatggtttcacgggaaacgctgtcttgaaaacgatggaaggaacggcttttgggatcttgaagcaattgaaacaagcaattgccacaggaaactggaaggcgaaattaggagcttttctgctcaaggaccgtttgaaatcattgaagcaaaccttggatttctcagatgttggaggagcggtcttgtttggtcttcaagcacctgttgttaaaacgcatggttcgagtgatgccaaagctgtctatagcacgattcgtcagattcggaccatgttagagacagatgttgttggaaaatcagtgaaggaattatcgaaggaagggtaatgtatgagtaaacaaaacgaaattttagttacaattgaggaatttctcaaagatcgcaagggtccagactttcaagtatctttggaatctgacttacgtaaggatttacaggcggattctgttgaattgatggaatttattatcaatcttgaggatgaataccaaattgagattccggacaaggctattgatgaatttaacacagtaggggatgttgtcgactatatcgaaaaacgaactgctggtcactaatgaaaaagggatcgttcagagattattctggatgatctttttttctgtcctttttattcggattctgcttatattgtacggaattttattgaaaatacactttgtatgtgatagaatgaaggtgataaaatacgaaaggcgaacaaagtcatgaccaatcaactgatttatactggaaaagctaaggatatctatactactgaggacgaaaatgtgattaagtcggtctataaggaccaggcaaccatgcttaatggggctcgtaaggagactattaagggaaaaggtgtgctaaataatcagatttcgtctcttatttttgaaaaattgaatgctgcgggtgtagctactcactttatcgaacgtatttctgacacagaacaactcaacaagaaagtaaaaattattcctttggaggtggttcttcgtaatgtgactgcgggttctttctctaaacgttttggcgtggaagaaggtttggacttgaaaactccaatcgttgaattttactacaagaacgatgatttggatgacccattcatcaatgatgagcatgtgaagttcttggatattgccaatgatgagcaaattgcctatatcaaggaagaaacacgtcgcatcaatgaattgttgaaggattggtttgcacaaattggtcttcgcttgattgatttcaaattggaatttggttttgataaggatggcaagatcatcttggcagatgaattctctccagataattgccgcctttgggatgctgaagggcaccatatggacaaggatgttttccgtagagatttgggtagcctaacggatgtatataaggttgtgttagagaagttgcaagacttgaaataatttggttgaaacggaaaaccttcgtcttcgataacatgtttgaatagaaataaaggaaataaaatggataaacgtattttcgttgagaaaaaagctgattttcgtgtaaaatcagactctttagtaaaagaattgcagcataatcttcagttgaaaacattgaaggatcttcggattgttcaggtttacgatgtttttggtttggcagaggacttgtttgcgcgtgcggaaaaacatatcttctctgagcaagtgaccgatactgttttggatgaagctacggttcagactgatcttgagaaatatgctttctttgcgatcgaaagcttacctggtcaatttgaccaacgtgcggcatcttcacaagaagctttgctgttgttgggtagttcaaatgacgtaacagtgaatacagcgcaattgtacttggttaacaaggatatcgatgcgaatgagttggaagctgttaaaaactaccttttgaacccagtggattctcgtttcaaagatatcactgttggcattgcgaaacaggatttctctgagtctgacaagaccattccaagcttggatttctttgaaaggtatacggcagaagattttgcacagtataaggctgagcaaggattggcaatggaagtggatgaccttctcttcattcaagattacttcaaatccattggacgtgtaccaactgagactgagcttaaggttttggatacttactggtctgaccactgtcgtcacacgactttcgaaactgagttgaaaaccatcgacttctcagcttctaaatttaaaaaacaattgcaagcgacttatgacaagtatattgccatgcgtgatgagttgggacgtacagaaaaacctcaaaccttgatggatatggcaactatttttggccgttatgagcgtgctaatggtcgtttggatgacatggaagtgtctgatgaaatcaatgcctgctctgttgaaattgaagtggatgtcaatggtgtcaaagaaccatggcttctcatgttcaagaacgaaacgcacaaccacccaacggagatcgaaccatttggtggagcggctacttgtatcggtggtgccattcgtgacccattgtcaggtcgttcatacgtttaccaagccatgcgtatctcaggtgctggtgatattacaacaccaattgctgaaactcgcgctggtaaattgccacaacaagtgatttctaaaacagcggctcacggttattcttcatacggtaaccaaattggtttggcgacaacttatgttcgtgaatacttccacccaggttttgttgctaagcgtatggagctaggtgcagttgtcggtgcggctcctaaagaaaatgtggttcgtgaaaaacctgaagcaggtgatgtgattatcttgcttggtggtaagactggacgtgacggtgtcggtggtgcgacaggttcttctaaagttcaaacggttgaatctgttgaaacagctggtgctgaggttcaaaaaggaaatgccatcgaagaacgtaagattcaacgtcttttccgtaatggagaagtgacccgtctgatcaagaaatcaaatgactttggtgccggtggtgtctgtgtggcgatcggtgaattggcagatggtcttgaaattgatctagacaaagtgccattgaaataccaaggtttgaacggtacagaaattgctatctcagaatctcaagaacggatggctgtagtggttcgtccagaagatgtagatgctttcgttgctgaatgtaacaaagaaaatattgatgctgttgtcgttgcaacagtaactgaaaaaccaaatcttgtcatgcactggaatggtgaaaccatcgttgatttggaacgtcgtttccttgatacaaacggtgtacgtgtggttgtagatgctaaggtggttgacaaggatgtcaagcttccagaagaacgtcaaacatctgctgaaacccttgaagcggatactcttgaagtcttggctgacctgaaccatgccagtcaaaaaggtttacaaaccatctttgatagctcggttggtcgttcaacagttaatcacccacttggtggtcgctaccaaatcacaccaacggaagcttctgtacagaaattgccagtccaacatggcgtgacaacaactgcatctgttatggcgcaaggattcaacccttatgtagcagaatggtctccatatcatggcgctgcttatgcggtcatcgaagccacagctcgtttggttgctgctggtgcaaactggtctaaggctcgtttctcttatcaggaatacttcgagcgtatggataaacgagcagagcgttttggtcaaccagtctcagctctccttggatcaatcgaagctcagattcaacttggtttgccatctatcggtggaaaagactctatgtctggtacctttgaagaattgacagtaccaccaaccttggttgcttttggggtaacaactgcggatagccgtaaggtcctttctccagaatttaaagctactggtgaaaatatctattacatcccaggtcaagctttggcacaagaaattgactttgatcttatcaagtctaactttgctcaatttgaagccatccaagctgatcacaaagtaacagcagcatcagctgtcaaatatggtggtgtccttgaagctcttgcccttgcaacctttgggaaccatatcggagcaaacgttgaattagatgaccttgacactagcttgacagcccaattgggtggattcgtcttcgcatcgcctgaagacattgcaggtgttgctaagatcggacaaacagtagctgactttacacttactgtcaatggtgtaacgcttgatggacacaaacttgacagtgctttccaaagtaaattggaagaagtttacccaacggaatttgcacaggcaactgagttggaagaagtaccagctgtggcatcagatgctgtgatcaaagctaaagaaacagttgatacaccagtggtttatatcccagtattcccaggtactaactctgagtacgattcagctaaggcctttgaaaaagaaggggcaaaagtcaacttggtaccatttgtcacactgaatgaagaagctattgtcaagtctgttgacactatggttgacaatatcgaaaaagctaacattatcttctttgcaggtggcttctcagcagcggatgaaccagatggatcagctaaattcatcgtgaacatcttgctgaatgaaaaagtgcgtgcagccattgatcacttcattgaacgcggtggcttgatcatcggtatctgtaatggattccaagctcttgttaaatcaggtcttcttccatatggtaactttgaagatgcaagcagcatgagtccaaccctcttctacaatgatgccaaccaacacgtggctaagatggtggaaacacggattgccaacacgaactcaccatggcttgctggagtagaagttggagacatccacgctatcccagtatcacacggtgaaggtaaatttgtcgtgacagctgaggagtttgcagagcttcgtgacaatggtcaaatctttagccaatatgttgacttcgaaggtaagccaagcatggattctaaatacaatcctaacggatctgtccatgcgatcgaaggaattacaagtaagaacggtcaaattattgggaagatgggacactcagaacgtttcgaagacggtctcttccaaaatattccagggaataaagaccagcatctctttgcatcagcggttcgatattttactggaaaataaaaggtatacaacatgacatacgaagtaaaatctcttaatgaagagtgtggagtctttgggatttggggacatccagacgctgcgaaactcacctattttggtcttcacagtctccaacaccggggacaagagggggcagggatcctttcaaatgatgcgggtcaattaaaacggtatcgtgatacggggcttctctcagaggtgtttcggaatcctgctaacttggataagttgacagggaagggtgcgattggacatgttcgctatgcgacagctggcgaagcttcggtggataacatccagcctttcctctttcgctttcatgatacccagtttggactggcccacaacggaaatttgaccaatgccaagtccctcaaacgggagttggaaaataacggggcaatctttagctcaacttctgattcagaaatcttggcccacttgattcgtcggagccacaacccttctttcatgggtaaggtgaaagaagccctgaatacggtgaaaggtggatttgcttaccttctcatgctggaagataagctgattgcggccttggatccaaatggtttccgtcctctttcgattgggaaaatggccaatggcgctatcgtagtttcctctgaaacctgtgcctttgaagtggttggtgctgagtggatccgcgatgtgaatccaggtgaagtcgtgatcatcgatgataacggcatcacttacgataactatacaacggacacccaattggctgtttgctcgatggagtatatctactttgcccgtccggactccaatatccaaggggtcaatgtccatacagcacgtaaacgtatgggcgctcaattggcacgtgaattcaaacatgaagcagatattgtggtcggtgtacctaattcatcacttagcgcagccatgggatttgcggaagaatctggcctaccaaatgaaatgggcttgattaaaaaccaatatacccaacggacctttattcaaccaacacaagaactacgggagcaaggggttcggatgaagctctctgccgtatccggtgtcgtgaaaggcaaacgggttgtcatgatcgatgattctatcgtacgtgggacaacatcacgtcgaattgtgaagttattgaaagaagcaggagctacagaggtccacgtagcaatcggtagcccagcccttgcctacccatgtttctacgggatcgatattcaaacacgtaaggaattgattgctgccaatcacacagtagaggaaacacgcgatatcattggtgcagatagcttgacgtatttgtcaatcgatggcttgattgattctattggaattgatacagatgctccaaatggcggtctttgtgtggcttactttgatggaaaatatccaacgcctttgtatgactacgaagaacgctatgtggaaagtttgaaagaacatacttctttctattaagagtagtgcaaaagaaaaggaatgaaacaaatgacaaataaaaatgcgtatgcacagtctggtgtggatgttgaagctggttatgaagttgttgaacggatcaaaaaacatgtggctcgtacggaacgtgcaggtgtcatgggagctcttggtggtttcggtggtatgttcgacctttcaaaaacaggtgtcaaagagcctgttttgatttcaggtacagatggtgtcggtactaaactcatgcttgctattaagtacgataaacacgatacgatcggtcaagactgtgtggccatgtgtgttaacgatatcatcgctgcaggtgctgagcctctttacttccttgactacgtagcaactggtaaaaatgaaccagctaaattggaacaggtcgttgctggtgttgctgaaggttgtgtgcgagctggtgcagctctcattggtggtgaaactgctgaaatgcctggtatgtatggtgaagacgactatgatttggcaggtttcgcggtaggtatcgcagaaaaatctcaaatcattgatggttcaaaagtagctgaaggggatgtgattcttggacttgcttcaagcggtatccactcaaatggttactcactcgtgcgtcgtgtctttgcggattacacaggtgaagaagtcctcccagaattggaaggcaagaaactaaaagacgttcttttggaaccaactcgtatctacgttaaggctgttctaccgctcatcaaagaagaattggtcaacggaatcgcccatatcacaggtggtggtttcatcgaaaatgtaccacggatgttcgcagatgacttggctgctgaaattgacgaaagcaaagtcccagttcttccaattttcaaagctcttgaaaaatatggccaaatcaaacatgaagaaatgtttgaaatcttcaacatggggattggtctcatgcttgcggttaaaccagaaaatgttgaacgtgtcaaagaacttcttgacgaacctgtttatgaaatcggtcgtattgtgaagaaagatggcgcaagtgtggtgattaaataatggtgctatcaccattttatacggagaaattgtagaaaggagtgtttagttagcaagcctaactgaacacgggactcattttctaggaaaaaagagaaatcattttgtgggcaagcacccagcaatgatttcctatttttctacgaaactgttcggctagccgaaacgtccctttgtatcgaatatgaaaatcgctgtatttgcctctggcaacggctcaaactttcaggtgattgcagaacaatttccagtagaatttgtcttttcagatcaccgggatgcctatgtcttagaacgtgccaaaaatcttggtgtggtgagtcatgcctttgaactcaaggaatttgacaataaagcatcttatgaagaagctatcgtcaaacttttggatgagcaccagattgacctagtttgtttggcgggttatatgaaaatcgttggtccaaccttgctagcagcttatgaaggccgtatcatcaatattcatccggcttatctccctgaatttccaggtgctcatggtattgaggatgcttggaatgcaggtgttgctgagagcggtgtgactatccattgggtggattctggtgttgataccggtaaggttattcagcaagtccgtgtgccacgtcttgaaggggatacccttgatactttcgagactcgcatccatgaagcagagtacaagctctatccagaagtcttggaacgtttgggagtagcacgaaaataaggaagccattgatcggaaagaacattttcgactgtagcagaaaaagaacttttttaaaaaggaaaagaaagaaaatgactaaacgcgcactaattagtgtttcagacaaagcgggtattgttgaatttgcccaagaactcaaaaaactcggttgggacatcatctcgacaggtgggactaaagttacccttgacaatgctggtgttgataccattgctatcgacgatgtgactggtttcccagaaatgatggacggtcgtgtgaagactctccacccaaatatccacggtggtctcctcgctcgtcgtgatctcgatagccacctggaggctgctaaggacaacaagatcgaattgatcgaccttgttgtggtcaacctttacccattcaaggaaactatcctcaagccagatgtgacttatgcggatgcggtggagaatatcgatatcggtgggccatctatgcttcgttcggcagcgaagaaccacgctagcgtaacagttgtggtagatcctgctgactatgctgtggttttggacgaattggcagccaagggcgaaacaagttacgaaactcgccaacgtttggcagcgaaagtcttccgtcacacagcagcctatgatgctttgatcgcagaatacttcactgctcaagtgggtgaagaaaaacctgaaaaactcactttaacttatgatcttaagcaaccaatgcgttacggggaaaaccctcaacaagatgctgatttctaccaaaaagctttgccaacggcttactccatcgcttcagctaaacagcttaacggtaaagaattgtccttcaacaatatccgtgatgctgatgccgctatccggatcatccgtgatttcaaagaccgtccaaccgttgtggccctgaaacacatgaatccatgtgggattggtcaagctgacgatattgaaactgcttgggactacgcttatgagtctgacccagtctccatttttggtggaatcgtcgttctcaaccgtgaggtagatgctgcgacagctaagaagatgcacggtgttttccttgaaatcatcattgcaccaagctatacagatgaagcgcttgaaatcttgacaaccaagaagaaaaacttgcggatccttgaattgccatttgacgctcaagatgctagtgaagtggaagcagaatacactggtgttgttggtggtctcctcgttcaaaaccaagacgtcgtcaaagaaagcccagctgactggcaagtggtgacgaaacgccaaccaacggagacagaagcgacagctcttgagtttgcttggaaagcgatcaagtacgtcaaatcaaatgggatcatcgtgaccaatgaccatatgacacttggtgttggccctggtcaaactaaccgtgtggcttcagttcgtattgctattgaccaagctaaagaccgtcttgatggtgctgttcttgcttcagatgccttcttcccatttgcagataatgtggaagaaattgccaaagcagggattaaagcgatcatccaaccaggtggatcagtccgtgacaaagagtcaattgaagcggctgataaatacggcttgaccatgatcttcacaggcgtgagacatttcagacattaatcaaaaaaggcactcattcaacgatgagtgtcttttctgctggttaagaagaccttaataggggtagatataggtgacggttccccagatggggttagttggatcgaaccaaccgcggaagttgtcgatatagcgatggccgttgtagttagcctcttggatctgaattttttggtcatgttcgacatccgtaaccaaggcgacgtgcccatatcccccatcatcccaacaggcgatggcaccgacctctggagtgtctcctgtccggaatccagcagcgcgtgcactagctgcccacatgccgccatttccccaccagttgtgggcccaaggggctaattctttggctccccaggtgcactcaccgatcggataggtgtctcccggatgtgtagcgagtggagtgagctttggctttgccttttctacttgaaatgtagtggggaatagcccttttagttgtccctggcttttctgatagacatgtaggtgaaatagcccgcttcccttgtgtttttgagcttgaaagcgcagttggaaatgtccaggtgcgaccttctttgctggataccagaccagatcatcttgcccattttcttcagaccagatggggaagacaatctcgtcaacgtcttcgaacaactttaggtctacctcaaattcttgttgggagatgggtgtgatcgtaatctttggctgggaggaagccaggtctttttgctggacgctggtcgtgagagggtaaagaccggttagctgttcatttgcctccactccatagacatggacatgataaagtccggcttgatcagaatggttggtcaatggcacttgtaggtcaaatcccttgtcactgcgttccacaggataccaaatgaggtcatcttggccattttggtcagaccagacgggaacttggatcttttgatacttatccgggacgtttccgagatgaatcaccagttgccctttttcggcatagatagcattggtcgcttgatctgcatgggcaatagaggcttgcatcccccatgtcgcacaagtcagtacgataaattttttgatcgtttgcataatactccttttcgtcaattagtaggtctcacctatactattcggaaaaaaatgagaaataggagaaaatagcaaaaaatgtttggattctactggaaataggagacttttgctgaaattattagaataaaacgaacgattatgatataatttaataaaataattcgcaaaagaggttcgagatgaaacttttggttgttggatctggcggtcgtgagcatgcgattgctaagaaattgttggagtctacaaacgttgagcaggtttttgtggctcctggtaatgacgggatgcgattagacggtctggatttgatcaatatcggaatttccgaacattctaagctgattgacttcgcaaaagcgaatgatgttgcttggaccttcattggtccagatgatgcccttgcagctggtatcgtgggtgatttcaatgcagctggtctcaaggcttttggtccgaccaaggctgcagctgagctggagtggtctaaggattttgctaaggaaatcatggtcaaatacgacgttccgacagcagcttatggaaccttttcagatttcgaggaagccaaggcctacatcgaagaaaaaggcgctccaatcgtcgtcaaggcagacggattggcccttgggaaaggtgtcgtcgttgcggagacagttgagcaagccatcgaagctgctcatgagatgcttttggacaataaattcggtgattcaggtgcgcgtgtggtcatcgaggaattccttgatggggaagagttttctctctttgcctttgtcaatggggacaagttctacatcatgccaacagcgcaggaccacaaacgtgcctacgatggtgacaagggtcctaacactggtgggatgggtgcctatgcgccagttcctcacttgccacagagcgtggttgacacagcggttgacactattgtcaagccagttctcgaaggcatgattaaagaaggacgtccctaccttggtgtcctttacgcggggctaattttgacagctgatgaaccgaaagtcatcgagttcaactcacgctttggagaccctgaaacgcaaattatcttgcctcgtttgacatctgactttgcacaaaacatcactgacattttggatggcaaagagccggccatcacttggacggacaagggggtgacactgggcgtggttgtagcttcaaacggctacccactcgcttatgagaagggtgtcaaacttccagccaagacagagggcgacatcatcacttactatgctggagcgaaattcgctgaaaatggccaagacctcctctcaaacggcggacgtgtctacatgctggtcacaaccgcagacaccgtcaaagacggccaaaacattatctacaaggaactcgataaacaaaacacagaaggcctcttctaccgaaatgacattggtagtaaggcgaataaataaattttaaaagcgatgaagtcgctaaacccgataatggtcaccgtggtgaaaagaccagaacagcatctgttctggtcgggggaaactttgagatcttaggctcaaagtttaggaatgaaaccaaaggtttgcttccgtcaccaccacctaagaccattatcaaaaaaagaaaaaggaaaaattatgactaaaccagtaatttccattatcatgggctcaaaatccgactgggcaaccatgcaaaaagccgctgaagtcctcgacaacttcggcgttgcttacgaaaagaaagttgtttccgcacaccgtacaccggacctcatgttcaaacatgccgaagaagcacgtagccgtggcatcaaggtcatcatcgcaggtgcgggtggcgcagctcacttgccagggatggtcgcagctaaaacgacccttccggttatcggggtacccgtcaaatcacgtgcccttagtggtgtggattcgctctattccatcgttcagatgccaggtggagtgcctgtcgcaactatggcgatcggtgaagcgggtgcgactaacgctgccctctttgccctccgccttctttcggtagaggaccaggctattgcgacagcgttagcggatttcgcagaagaacaaggaaaaatcgcagaggagtctacaaatgagctcaactaaaaccattgggatcatcggtggtggtcaactcggtcagatgatggcgatctcagctatctacatgggacacaaggttattgccttggatccagcagctgattgcccagcctctcgtgtggcggaaatcatcatagctccttacgacgacgtggatgcccttcgtcagttggcagatcgctgtgatgttctcacttatgaatttgaaaatgtggatgctgatggtttggatgctgttatcaaagaaggacagcttccacaagggacagacctgcttcgtatctcccaaaaccggatttttgagaaggactttctttccaacaaggcccaagtcactgtggctccttacaaggtcgtgacctcaagacaagatttgacggatatcgatctgtcgaaaaactatgtcctcaaaacagcaaccggtggctacgacggccatggtcaaaaggttattcgttcagaagcagacttggaagaagcatacactttagcggactcagcagactgcgtcttggaagaatttgtcaactttgacctggagatttctgtcatcgtgtctggaaatggcaaggacgtgacagtctttcccgttcaggaaaatattcatcgcaacaacattctttcaaaaacgattgtaccagctcgcatttcagaaagtctagctgaaaaagccaaagcgatggcagtgcgaatcgcagaacaactgaacttgtctggtacactttgtgtagaaatgtttgcgacagcagatgatatcattgtcaatgaaatcgcacctcgcccacataattcaggtcactactcaattgaagcctgtgacttttcacagtttgacacgcacatcttgggtgttctcggagcaccactcccagcaatccaccttcatgcgcctgctgtcatgctcaatgttctcggccaacacgtcgaggctgctgaaacatatgtgacagaaaatccaagcgctcacctccacttatatggtaaactagaagcaaagcacaaccgaaaaatgggacatgtgaccttgtttagtgatgaaccagataaggttgaagagtttggaaaagggattgatttttgaaatgacagaagaatttgatgaattgctggatgatgaaataacgaccgtaacactgacttatacggacgatttgattgttccagagattgcggatagagagaggattcatattttagaaagagctggcaatcagctagtcttagaatattcttgttccgtgaaggaagttaaggattatctgagtagttacggcctgcctagacaacctgagagaatttcatttgaattttctatacatgaagactcagaaaatgataatctttaaagctaaatggagaccagtttatgattcaaattattgtcaacgcttttgttaaacaagagaagccagacaactactgctggaaagggattgatttttaagtgaaaatagtgattctaggacttggagtcatcgggaccacttatgcctacgcctttcaaaaagcaggccatcaagtggaacacgtactgagagatagtaagaaaagcacagctccgaaggagttgtcggttgatttgctagatggtcgctatcattccaagggtgagaataagcatgatacctatgaggttcatgtggcggaagctgattcggaatatgattttatttttctgagtgtgcgtcatgggtttgtcaaagaagctgtggagaccttgcgaaaaaataatatcaaaggtacccttgttttcttctgcaatttctgggatactcgaaaagaggtccaagagtgggcaggggattacgactatattctggcatttccgacagctggaggtcacatgcaggaggaccatttggatggtgtcttgtttgaccatttaatgctagaaggtgagcaaaaagcacagatttctaactatgctgatttgacgtctttactgacttctgcagatttgaagtgggaagtgcctcatgatatggtcgagtggatttggattcacatggcgattaatgcaggtgtcacttcgacagcagcacgttcagggaatctggaaaacccagaagaactggctttgaatttaatgaatagttcttcggaattgtcattagccatcaaggccattcgagaagctttgaaagtcgtagaagcgcgtggtgtgaatttgaagctttacaaagccgaactcttgccatacaaaattccggcttggatagccggcaaagccatgaaagtcatgtttgcgaaaaatgagctgactcgaaaaattatgactttgcacaatgataaacaggacatcttctattgttgtcaaagtgtttatcagactggtcaagaattaggtgtcaagatgcctattctggaagcaaatatgaagggcatttcgctttaggaggttttatgattcaactcattgtcaatgctttcgttgagaaggataagactggagcagtcgttgaagtcttgtatgcgagtagcgatcacgaaaaagtgaaagctaagtatgaagagctgactgctcaatatcctgaaaactatttagccatctatgatgtcccactggatacggatttgaatacactcgatcactatccatctgtgtggatcgggaaagaagaatttgagtaaagcgactgtcggttgctaactgatgtaaaacatcaaaagaaaggaaaattaaacatgattgatagatatagccgccctgaaatggcgaacatttggactgaagaaaataaataccgtgcttggcttgaggtggaaatcttggctgacgaagcatgggctgaattgggagaaattcctaaggaagatgtggctttgatccgtgaaaaagcggactttgacatcgaccgtattcttgaaatcgagcagcaaactcgtcacgatgtggtggccttcacacgtgcggtttctgaaacgcttggtgaagagcgcaagtgggttcactatggtttgacatctactgacgtagtagatactgcctatggttacctctacaaacaggccaacgacatcatccgtaaggaccttgaaaacttcctcaacatcatcgctgacaaagcgaaagagcacaagttcactatcatgatgggtcgtacccacggtgtgcacgctgagccgacaacttttggtcttaaattggctacttggtacagcgaaatgaagcgcaacatcgagcgtttcgagcatgcggctgctggtgtggaagctggtaagatttctggtgcggttggtaactttgctaacatcccaccattcgttgaaaaatacgtctgcgataaattgggtatccgtgctcaagaaatctctacacaggtccttcctcgtgaccttcacgctgagtactttgcagttcttgcgagcatcgcaacttctatcgagcgtatggcaactgaaatccgtggtcttcaaaaatctgaacaacgtgaagtggaagagttctttgccaaaggtcaaaaaggatcttcagcaatgcctcacaaacgtaacccaatcggttctgaaaacatgacaggtcttgcgcgtgtgatccgtggtcacatggtcacagcttatgaaaacgtagccctttggcacgagcgtgatatctctcactcatcagctgagcgcatcatcgcaccagatacaactatcttgattgactacatgctcaaccgtttcggaaacatcgttaagaacttgacagtcttcccagaaaacatgattcgcaacatgaactctacatttggtttgatcttcagccaacgtgccatgttgactttgattgaaaaagggatgacacgtgagcaagcttacgaccttgttcaaccgaagactgcccaatcatgggataaccaagtagacttcaaaccacttcttgaagcagatccagaagtaacttcacgtctcactcaagaagaaatcgacgaaatcttcaacccaacttactacaccaaacgggtggatgaaatcttcgaacgcatcggtttgggtgactaagcgcaacgaaaaagggaatttgaaaaatagacgaaagaggctgggcaaaaactgtccagcctttgatgtttgataagactaactgcaagacgcagtggttgattggtatctttgttcgcttatgaagctccaaagatgacctaatcaactgtgcgggggtggggaagacgaactctttttaactagtcggagttctttcccactccctttttaaactttttatagttaaactatcactaattatatatatttttaaagaggtctttagaaatcgttttcaacatgctatactggatctataaaaaagaccgagatgtctcagtctttttggttcttagtgatcgcggtcacaggagatgaacttgatcttgtagtagtcaccgcgtttataggtttccgtgtattcaaggatttggccagtcgcttctagcttggtcgtcttcacttgtttgaccgttgggaaattttcgtcgatgttcaatactttagcaaccttgtttggtgtaggaaagacgatttcgttgacttcttcgaagtgttcatcattcatatgaatgtggtagtcttctttgaagcgatcatagatagagctatagtattccaaatttggatagtttggattgatgtattgttcaggaatataggtttggtggaagatataggtatcatcccctgtctggcgagtccgttcgatcttatagtagaattgcgttgggttgaggcctagtttgtctaggatgcttaaggtatttccacgtttaatagagagaactttgactttggccttttggattgggaaggtttcaacatctgaaaattcaaccagtttgtgttttcgagcacgagaaacaaaggttccttttccttgctgacggacaatgtagccatcagcagcgaggtcgttcaaagcacggacaacggtgatagagctgacatcataaattttaatgagttcagcttcagtataaaatttatctccattttcaaattttccggagataatttgctgcttcaattcatctttgatgtgttggtactttggaattgccatagtgctacctctctttagatttctcttatttaaccctattttaacatattttttataaaagtgttgacattttttaaataatttattatattaataaatgaaaagagttacatataagaaaggggggcgtttatgggagtttttgagattcgcgatgctttctatttaaaagatcaacccttcaagattttatccggagcgatccattatttccgaattgacccagcagactggtatcattccttgtataatctaaaggctttgggttttaacacggttgagacctatgtcccttggaatgcgcatgaaccccgcaaagggcagtttgactttagtggtcgattggatctagagcgtttcattcaaacagcccagtccctaggactttacatgattgtaaggccgtcgccctttatctgtgcagagtgggaatttggtggattaccagcctggctcttggaagaagacctgcgaatccgctcatcagacccagcctttatcgaagcggtggatcgttattatgatcgcttgcttggcttgttgacaccctaccaagtggatcaaggtggtccaatcctcatgatgcaggtggaaaatgagtacggctcttatggagaagataaggattatctgcgtgccattcgggatttgatgaaggaaaaaggcgtgacctgtcctctctttacatcggatgggccatggcgagcaacgctaagaacaggaaccctgattgaagaagacctctttgtgacgggaaacttcggttccaaagcagcctataactttggtcagatgaaagaattctttgacgaatacggcaagaaatggcccttgatgtgtatggaattctgggatggctggtttacccgctggaaggaacccgtgattcgaagggacccagaggagttggcagaagctgtacatgaggtcttggagctcggctccatcaatctctatatgtttcatggcggaaccaatttcggcttcatgaatggttgctcagctcggggtacgcttgatttgccacaggtgacatcctatgactatggggctttgctcaatgagcagggcaatccgacggagaagtattatgctattcaaaaaatgatggcgacctattatccggaatacccacagcaagaaccactcatcaaagagtgtttgccagagcagactttacatttggcaaccaagactagtctttttgggaatctggacaatttggctcaagtcaaaaccagtctctatccggaaaagatggaagggttagggcaaaccacaggttatctgctatatgagacagaccttgagttggatgcggaagaagaaaaactgcgcatcattgatggccgggatcgggtacagatttacctggatgatcaacatgtagcaacgcaataccaaacagagatcggtgaagatctttttatcaaaggaaaaaagaaagcggttacgaatttaaaaatcttgcttgagaatatgggacgtgtcaactacggccacaagctcttagctgatagccagcacaagggcattcgcacaggtgtctgtgtggatttgcatttccaccttcattggaagcagtacccactggatttacaagatctcagtcagctcgatttttcaaaggaatggcagacaggtgctccagccttttaccgatatgattttcagctggaccacacccttgacacttatctggatatgacaggatttgggaaaggggtcgtctttgtcaacggccataaccttggtcgcttctgggaggtcggaccgaccacttcactttacgtgcctcatggcttcctcaaagaaggagccaatagcctgatcgtctttgagacagaagggcggtaccaagagacacttcaacttgttcaacaacctacattcaaagaagtaaagggggaaaacttatgactattgtaggatgccgtatcgatggacgtttgatccacgggcaggtagccaatctttggactaccaaactaaatgtttcacgtatcatggtgatcgatgatgaagtcgctcaaaatgatattgaaaaaagtggcttgaaactagcgacaccacctggtgttaagctcagtatcttgccagtcgcaaaggctgcggaaaatatcttggctggaaaatatgatagccaacgactctttatcgtagctcgcaaacctgatcgtttccttcgtttgatcgaagcaggtgttcagcttgaaacgctgaatgtcggcaatatgtctcaatctgatgagacacgtgcgattacccgctcgatcaatgtggtggacgcggacgtggaagacttcaacaagatccacgaaaaaggtgtaaagattacgtctcagatggtgccaaacgacactgcagaagactttatgaagttattaaagtaaaagaaaatttttaggaggaaattgtcatgatacaatggtggcaaattttactacttactttgtactcagcttatcaaatctgtgatgagttgacgattgtttcatcagcaggctcaccagtctttgctggtttcattacaggacttgttatgggggatttaggaacaggtctctttatcggagcgtctctccaattgacagtgctcggtgtaggtactttcggtggagcttctcgtattgacgccacttctggtgccgttcttgcaactgccttttcagtagcgcaaggtattaaaccagaaattgcgatttcaactattgccgttcccgtagctgctctcttgacctatgcagatatccttggccgtatgagtactactgcctttgcacaccgtattgatgcggcgatcgaacgctttgattataaaggaattgaacgcaactaccttcttggtgctgttccttgggctctctctcgtgctcttccagtcttcttggctcttgcctttggtggtgcttttgtccaatctgttgttgactttgttgcaaaatatcaatggttcgcaaacggcttgactcttgcaggacgtatgcttcctggtcttggatttgcgatcttgcttcactacttgcctgtgaaacgtcaccttcactatcttgcccttggttttggcttgacagcgatgttgacagtgctttacagcaatgttcaaagtgttggtgctgcaatttctgctatgcttggaacagatgcgtttgcaaaacttccaaaagaacaaatggttgccttcacaaacaacttcaaatctgtatctatgatcggggttgccatcatcggtatcttccttgcagtgcaacactttaaaaacagccaacgtacagttgtagctgctccagcaagcaatgtagaaagcggggaaattgaagatgacgaattctaataactacaaactcactaaagaggattttaaacaaatcaacaaacgtagcctcttcaccttccaattaggttggaactacgaacggatgcaggcttctggttacctttacatgcttcttccacaattgcggaaaatgtatggagatggcacacctgaattgaaagaaatgatgaaattgcatacgcaattcttcaatacttctccattcttccacaccattatcactggttttgatttggctttggaagaaaaagatggtgtcaactctaaagatgcggttaacgggatcaagacaggtctcatgggaccatttgcccctcttggagactctatctttggatctttggttccagctattatgggatctattgcagcaaccatcgcgtcacaaggtcaaccatggggtatcttcctttggattgctgtggcagttgcttatgatatcttccgttggaaacagttggaattcgcttataaagaaggtaccaacttaatcaacaacatgcaaagtaccttgacagctttgatcgaagcagcttctgtacttggtatcttcatggtcggtgccttgattgcaacgatgatcaatgtggatgtaacctggatgccacacatcggggacaaagccatcgatatccaagacatgctcaatttgatcttcccacgcttggttccagctattatcacaggtgtgatttactggttgcttggacgtaaaggaatgaactcaactaaagctatcttgttgattatcgtcgcagcgattgccttctctgcctttggtcatttctgcttcggcatgcagtaatggagtagggtatggcaaaagagttagtactggtcagccatggtcgcttttgtgaagagctcaaagcgagcacagagatgattatggggccacaagaatccatccatacggttgcactcttaccagaagaagggccagaagactttaccgctaaatttgaagcaaccgtccaaggtctagaagactatattgtatttgccgatctcttgggaggaactccttgcaacaccgtgagccgcttgatccttgaaggacgtgcgattgacttatacgcagggatgaatcttccgatggtcatcgagttcatcaatagtagcctgactggtaatgaaggggactaccctgaacgtgcaaaagaaagtattgtcaaggtcaatgacctcttgtcaaaccttgatgatgatgaagatgagtaggttggtatgggagtctgggagcatcatctcaggctcctttcccatttatcaacgttagattgtagaaaggaacaacagtttctatgttagactatacaaaagaagacttgcaggagctaggagcagagatcaccactcgtgagatctaccaacaaccaagtgtttggaaagaaacggctcgcttgtaccaagaaagaaaagcggaaatcaaagctttcttagaaaagattgggcaagagcatgactatatcaaggtcatcttgacaggggcaggaacctcagcatatgtgggggataccttggttccttacttgcaggaagtgcacgatgaacgccactggaattttcaatccattgcgacgacggatatcgtagctcatcctcaaacctatttgaaaaaagaggttccaacggttttagtatcttttgcccggagtggcaattcgccagaaagtgtcgcaaccgtgcagttagctcaagacttggttgatgagctctatcagatcaccattacctgtgccgaagaagggaaactggcccagcaagcccacggagatgagcgcaatctcttgcttctccaaccaaaagaaaccaacgatgctggctttgcgatgacctctagctttacctccatgctcttgacagctctcttggtctttgatccaagcgaggaagagatcaaagaaaaacgagtagaagaactgattcatctgtctgaacaaatcttggagcaggaccgtgcggtcaaggaagtggtcgatctagactttgagcgcgtgatctatctgggagcaggacctttctttggcctagcccatgaagcccagctcaagattttggaattaacagcaggaaaaattgcaaccatgtatgaaagtcctgtcggattccgtcacggtccgaaatccctcatcaatgaccagactctggtcctggtatttggctccattgattcttatacccgtcagtatgatctggacttggttcgcgaagttgcaggagatcaaattgcccgtcaggtcgttctcttggctgatcaagctgcagggatcgagcatgtacgggaagtgttggtggaagcatcagcagactcattagatatctaccgtgccttcccttacattatctatggtcaattgatttctcttttgacttcgctcaaggtgcaaaatcgcccagacacaccttcaccgactggtaccgtcaatcgggttgttcaaggggtgatcattcatccatttcataaagaatagccactaattttctataaaaagtggagtgtttcttcttgtgaaactgatacaatggagaaaaacagtgagaggagaaggttagtgaaacagtatcaagaaagcgtgtttggggaatggcaaaatcaagaggttcgggcttatcgcctcgaaaatgacaagggctaccaattatctgtcatgacctatggggcgacgatcttagaatatgtgacaccggataaagaagaccagtttacgaatattattctaggctttgatcgctttgaggactatgtgggcaatagccctaaatatggggctagtattggaccggtagcaggtcggattgcaggagctagctttgaactcaatggagagacctatcacttggaggccaataacggtgccaactgcaaccacagtggaccgacgggttgggacagcgctttgtttagcgtggagtcggtaacggatcaggaaattaccctatacacagaacgtgcagatggaaccggtggtttccctggaaatctcaagatctgggtaacctatggtttgacggaagatggtgaactcgagattgcttatcgggtagaaacggatcaagataccttggtcaacccgactaaccacagctatttcaacctatctgggaacttcacccagccgatcaatgaccatgtctttcagatcaaccatcaagggctttaccctatccatccagacggtgttcctcttcagaccgtggatagagaaagtccggttgtccagcatctctaccaagctatgctcttggaggatctttttaaggactctgatccgcaaatccgtctggtagaaggattagaccatccatttgctcttccagaagggcatgaaaatgccggctttctttaccatcagccatctggacgttttttgaccttcaggtcagaagccccagccttggtggtatattcagccaatttcgtagacgaaactgttcatctgcaaggccaaccaatggttcagcacaatggcttggctctagaattccaaacagtgccagatgccattcacagtgaccaggctgaaaaggtcatcttgagagcaggtcaagtcttcaccagcaagactagctaccatgccatcgctaagaaataaggaggaaaggggtgacccaaacaaggatgtgaaaatcttgcttgggacatcctctttttctagaaaaaattttttagaaaaactataaggaaattttaagcttcctatcgtatactaatagcatcatcaaagacctcctaactttgaatgataaaactcctaaaactttttcataataatctccctataagagccaccaaaatcggtggctttttctatgtaccttagcgaacgttagtgagcttaggtacattgatgcagtttgagcggagcgaaaactacgttccttattctttacgagcattagcgagcttaggtacattgacgcagttcgaacgcaagtgagaactacgatctttaaaaaattaatgaggtgaactcagagagttcaaccgaaccaaaggtaccgaagtattttaatagggcgtaagctctttatttttttgcacagaaaaaagctccttgagaaattctcaaggagcagtggaatgactacttgctcgttgcatcagacacttttttgaattttgctgaaataatcgtatttagattattatgtccatcgcgttgctcaatcgtcaacgttaaaatatctccatcaatagagtatttatacgtagtttctttagcgacaggtccaatggacatggttgcaagttgcacaatattgatagcttctgggaagataatcgtttggtttgctgtatctaatttaccgttcttcaatacagaatgaattttagcattacctctatcaaattcataagttgtattgggcaagtctttagcgccatcctgtagattgactgataatttattaaattgatttttaatatattcttctttcgtttgagtcactttagatgcatctttttgttttaagtaatcgtagaaccttccaaaaccatctgctagagatacagtatagtcgaattcaacagatgtacctgtaatgttcaacgttggttttaaatctttccatgcctcaggatagataagcttgatagccgaatcatcattgtcaaaatctttaaaggctaagctacgttcaagagctggtcggaagtcgatggcttgccattttccttcaattggaacagggtctttttgagtagtgcttcctttacgtttgaagtgtagttcatagtgaactggaagattatttttcttcgcttttccatcaatcgtgacataaagcatgtcgtcttttaatttgtagtgatatgtgtttggcgaaacgcgattttcaccgaatgagaagaagaatgagtttgctactgaaagtccttcatcaaaggtcattgttttggcaccttgatcaatagaacccgttgcttcgtagctaaacacgccagtatctttattcatgctgactttgtatttcttaaagtcgcctgcaaatccttcatgagagtcatacatgatttttttgaattcttcttcagtcttgcctctagcttctgttgtgacagtggagaaagctttaataaagttatcaatgttatagtcgtatttaatggttgccgtattgttttcaatcttcatgtccattttgaagtctttaacagattcaagcaagtgtgcaaagtggattccatggagggtataggcaccgatggattccgttaaagcatcgagagtatcgactaattcccattcgccatcaatcgtttcgacttttgctgtttctgttttagcagcctttttagagccactttgtttttgagaacaagaagctagtaggaagactgagagcagagcaacgaatgctaaaaataattttttataacgtctaatcatcgctagacctccttaaaatagatgattgtattacgcttatattatacgtgcaacataattgttttgcaagggctttcaaacgaatcacaattttgttttgtaacttgaccgattattcaacataagaaacggaaaaattgtatgtagcagagtacccaatagatgagattctcaaggcttcctaaattattttgtttgcacgcaaaagccccttgagaaattctcaaggggcggtgagctatttaattagttttaggatctgaaactttcttgaatttcattggataaacgagatgtgctcctgtttcttcgaatgttttttcagcgtaaattgtaaggatgtcaccattcaattcgtagtgataagtaattggtacgtctgtagaattaatataaagaggtagaactccaaagatgtttgggacttcagggaatacgatcgtttttgcattctcgtttaaaactccatcttttaacgttgcagttaacacttttgtatcgttatcaaacgttccagtttgatgtttaaaacttccaaatttcttttctcttacgcctagaaggatggcagtagcttcttcttttgtaggatattcatctttattctgttcagcataaaaatcaatatacttattcatatcagcactataagaataagttacatctgttcctgtgatttttagagtcggaacgatatcttggaaggcttcagtaacctttaatcgactattagcatcaccataataaattaagaaagtacgttccactgtatctctaaaatctacagctttccagtccccttcgagtgagactggggtcggtgctactgtggtagtttctgcaactgttgtagtctcagctgttgtttgttgttgctgttgtttctgttgtttttgcccacatcctgatacaaatagaagagcaagaagggaaaacatccatagggaactttttttcatattgttcatgattgatcactccttctaatgattgtctcctacgtagttgaaacgaagacgcattactctaaaatgactttgttcatctttcccttcagcataaagtgttatttgcttaccttcaacggtgtaagtataagtaatgggtacaagtgaattatacgtggttcccataacaattctacttaaaaatgtaggtgtttcagggaacgtaatagtatgtttctgtgtatcgatttctccagttagagagtaatcataggcataattaggttcgtcaagagtaatctttgtatgtttcaaatttggaatataattcttaaattcagcagttttattttttaaatacgattcataattcgctttgttctctcctgttgcaaatgcttgatcctcatacagttttctgtaatcaaaatggtacttcaattcaacggttttatctttaatggtcatcgtcatcttaaccttatcgaagtcatcaagcattagtacagcggcaagttttttgatattagaagctaggaatactttttgaatggtcatttgttggtcagtccatttccaagttccttgttgatcctttgtaagatcttgtggtgctttgattgtttgaggagatttatctgtttgagaagacttatttgttttagaagactgcgatggagaagactgacatcctgcaataaggagcactgcaaagaatgccaagaaaccgaaaaggatcttctttgttttagtaaacataaatttacctcctaaacgttgttgctttaattttatcattaaaggaaataattataaagtgaaatggtgagcgatagaagaagaagggactgtataataaaaagaaaggttggcgatgagggcaaccattcaacttattctaacgaacgctagtgagaaccaggatctttaaaaaacacattctatttatggtaccgaaggtatcattttttgctataatagactgtatgagtagaattttagacaatgaaatcatgggcgatgaagaggccgttgaacggacgttgcgcccgcaatatttacatgaatatatcggtcaagataaggtcaaggaccagctgaaaatctttattgaggcggctaagcttcgggatgaggcgctggatcatgtccttctttttggccctccggggcttgggaaaaccaccatggcctttgtcatcgctaatgaactgggcgtcaatctcaagcagacttctggtcctgtcattgaaaaggccggtgacttggtagctatcctcaatgatctagaaccgggggatgtcctctttatcgatgagatccaccgtcttcctatgtcagtcgaagaagtgctttacagcgccatggaagatttttacatcgacattatgattggcgctggggagagcagccggagtgtccatctggaccttcctcctttcactttgattggggcgacaacgcgagctggtatgctgtccaatcccttgcgtgctcgctttggaattacggggcacatggaatactatgagcaagatgatttgacagagattgtcgagcggaccgccgaaatctttgagatggaaattacccacgaagctgccgaagagctttctcttcgtagtcgtgggacccctcggattgctaaccggttgctcaaacgggtgcgcgattttgcccagattatgggcgacggcttgattgacgataccattaccgacaaggctctctctatgctagatgtggaccatgaaggactggactatgtcgatcaaaagatcctgcgcaccatgattgagatgtacggcggtggcccggtcgggcttgggactctatcggtcaatattgctgaagagcgcgagaccgtagaagatatgtatgagccttacttgattcaaaaaggctttatcatgcggacccggacagggcgcgtggcgactcgcaaggcttacgaacacctggattatccctacaatggagactagaagaagatgctgacggaagaagcaatagtagaacaaattcaagcggatccggagatgatgactgtcttggctatcattcgagatctagatttggtagattcttggttagcggcgggtgcggtgcgcaatttcatctggaaccagctctctggaaaaccagggtttgatgcgacgaccgatatggatctggtcttttatgaccctgagatcagctatgaggagactctccagatcgagcaggaattaaagaagacctatccccagtacgcttgggaagtgaaaaatcaagtctacatgcaccagcatagcccggggacggctccatatcatagtgcctgtgatgcggtttccaaataccccgagcagtgtacggctcttgcggttcgcttaaggaaagagggtcagctagagctctttctcccttatgggacaagggatatcgaagacttcatcgttcagccgactccgcattttttagccaggcccgagcgtttagcggtttatacagagcggatgaaaaagaaaaattggcagagtaaatggcctctattagaggttcgttttccaaaatagagaaacagatcagatttgaataaggaatctgatttttctttaaaatgatggagcccctttgtcatctttctgtcacatttttgttataatagtaatagtatgctggttttccatagtggaaagccaagagctcagctaggttgggcagtccgaacaaggagttaggtggaatcatgaaaaaaattgtctttgtctgcttaggaaatatttgtcggagccccatggcggagtttgtcatgaaggatttgaccgatcagtatgagattgaaagtcgggctacttctagctgggaacatggaaatcctatccatcggggaacccagaaaatctttcaacaacaccaggtcccgtatgatccagctaagacgtccttacagatcaaggaagaggatttttacaactttgatttgatcctagggatggacgaaaacaatgtagcagatctgaagcgaatggctcctgcaggaacagaacacaagattcatctttttgctgctgaaagtgtgccagatccgtggtataccggtgattttgaggagacctattccagagtcctgagcggctgtaaggcttggttagatcagttagcaacttcttaagagtttgatatgtgagagaatacagaatatgaaagaattttatgagacctataaggtctatctgacgcgaaaaaatttagaaatagcagcattagtcgtgattattctatctgctttgctggttttcctttcagccattccaggtcagggcgtcttgaccttggataagggggcgatccgttacgacggaagtttggtccgtggcaagatgaatggcaagggaaccgtcacctttaaaaatggggatacctatacaggtaacctcgtcaacggctcttttagcggctatggtaagtttaagtccaaggatggttggacctatgaagggcagtttgttaacggccagccggagggcaaaggcaccttaaccacagaagccaacgtcgtatacaaaggaacattcaagcaggggatttatcaaaatgcgcattaaatggttttcactagtccgtgttacaggactcttattggtattgctttaccatttcttccaaaaagcctttcctggaggcttcattggggtagatattttcttcaccttctcaggatttttgattacagcgctcttgatcgatgaatttgcgcgcaagcaaggaatcgactacctggcattcttgaaacggcgcttttaccggatcgtaccaccccttgtctttatggtcttggtcgtgatgccctttacctttatggtccaacgggactacgtggctggtattgggactcagattgcggcggtcttcggttttgtgaccaatttctttgagatggcaacgggtggtagttacgaaagtaacttcattccacatctcttccttcatacctggagtttggctctagaagtgcattactatgtgctatgggcacttttggcatggttcttggctaagcgggctaagacggttggaaagtaccgaggcatgctcttcctggcatccagtgggctctttctcttcaccttcttgtccatgttcatccgcgcctttctgacagctaatttctccaccatctatttttctagcttcactcacatcttccccttctttgcgggatcatgcctagcaacggtgacagggattgccaatgtcagcccgaactttacaaagctggtgcagtcttggagcatgaaaaagaccttatcggtcttgggtggaagctttgccttcttgtttgtgctcagtcttttcttgccatttgatagcttgtggacctatctgtttggctttttagcagcgacaatcgcagcttgtgccatgattctgtcggcccgcattctccatgagaagacgccggataaaaaggaaccagccatcctcaatttcttggcagataccagttatggtgtctaccttttccactggcctttctttatcatcttctctcaacatttgggaaatatgatggcagcccttgtgacgacgatcgtttccttgattctaacggctctgtccttctatattttggagccaaccattgcaggcaaggagcctcgtgtctttggtatgaagatggatctcagctttttgaccaaaccgatcttttacctcatgattcctctggctctcttgatggttggaatctccgcctttgcacctaccgttggagcttttgatgagagtttggtagtgagtgggctcaaccaagcagacagcaaaatgcaggtcacacggacgcaggtggacaatgcgactgcaacagactataacgtctcaaatggtgtgaccatgatcggtgattcggttaacttgcgagcacaggactacctgactaaagccatccctggcatccagatcgatgcagtggtgagccgtcagttggaaaatggaatgaaggtctttgagaccgatatctccaataaagttctcctaaaaaatgtggtcattgccctaggaaccaatactgtaagcaactacaaagaattgctggatcagtatgttgagaaacttccaaaaggccgtcgcttgatccttgtgacaccatatgatgggcgctatgccaacgatcagtccagtgaatcggttcaaacgcgtctttatgagttggaactagctaagaaatacgactttatcacgattgcggactggtaccaagtagcaattgaaaatccaaacatttgggtgggaacagactctgttcacttcaatatggaaaccaatggtggggaactctatgctcaaacagtcaaagaagcccttgataaggccgaaaaaggtccggtcaagaagtaacaatgcttctctgaaactgaaacaaaacaaatcctaacaaaataaaacaaaaagcaactttttacttgtaaaaagctgcttattttagtaagattaagaaaacgcttacaaaaatcaattgaaaacatctctttgtgaagaaaaaatttttttaattattttttcacaattttgctagacaattgctttcacatcaataagattgataaaaatttcacaaacttcaaaaaaatctttgtgaaagttgcttggaagtgtttacaaaaatctcaaaatagagtacaattatattgtgaaataattaacaaatcgaaatttcttacactattcttgaaaatttcagaaaacatgaaaaagttctagaaaaggataagggtttcaaacattggaggaaagcatcaaatggctgataaaaaaactctctcacctgaagaaaagaaactcgctgctgaaaaacacgtagacgagttggtgcaaaaagcgctggtggcgcttgaagaaatgcgcaaattggatcaggagcaagtagactacattgtggcgaaagcatctgtggcggctcttgacgctcacggtgagctcgctcttcatgcctatgaagaaactggtcgtggagtctttgaagacaaggcgacgaagaacttgttcgcttgtgaacacgtagtaaataacatgcgtcacacgaaaacagttggtgtcatttcagaagatgacgtcactggtttgaccctgattgctgagccagtcggagttgtctgcggaatcacacctacaaccaacccaacttcaacagcaatctttaaagcattgatttccttgaagacacggaaccctattgtctttgccttccacccatctgctcaagaatcatctgctcatgcggcacaaatcgtccgcgatgcagcaattgcagctggagcacctgagaactgtgtgcaatggattacccaaccttctatggaagcaaccagtgcccttatgaaccacgaaggagttgcgactatccttgcgaccggtggtaacgccatggttaaagcagcatactcatgtgggaagccagctcttggggttggtgccggaaacgtgcctgcttacgttgaaaaatcagccaacatccgccaagcagcacacgatatcgtcatgtctaaatcatttgacaacggtatggtctgtgcgtctgaacaagcggtcatcatcgataaagaaatctacgatgagtttgttgaagaattcaaatcttaccacacttactttgttaacaaaaaagaaaaagcccttcttgaagagttctgcttcggcgtaaaagccaacagcaagaactgcgcgggtgcgaaattgaatgcggacatcgttgggaaaccagcagcatggatcgctgaacaagctggcttcactgtaccagaaggaaccaatatccttgcggcagaatgtaaagaagttggtgaaaaagaaccgttgactcgtgaaaaattgtcaccagtcatcgctgttttgaaatctgaaagccgtgaagacggaattaacaaagctcgccaaatggttgaattcaacggtcttggtcactcagcagccatccatactgctgatgaagaattgaccaaagaatttggtaaagcagttaaagctattcgtgtgatctgcaactctccttcgactttcggtggtatcggggatgtttacaatgccttcttgccatcattaacacttggatgtggttcttacggacgcaactctgttggggacaacgttagtgccatcaacctcttgaatatcaaaaaagtcggacgccggagaaataacatgcaatggatgaaacttccttcaaaaacatactttgaacgtgattcaattgaatacctacaaaaatgtcgtgacgttgaacgtgtcatgatcgttacagaccacgctatggtagagcttggtttccttgatcgtatcatcgaacagcttgaccttcgtcgcaacaaggtggtttaccaaatctttgcagacgtagaaccagatccagatatcacaactgttgaacgtggtacagagatcatgcgtgccttcaaaccagatacgatcattgctctcggtggtggatcaccaatggatgcggccaaagttatgtggctcttctacgaacaaccagaagtggacttccgtgacttggtacaaaaattcatggatatccgtaaacgtgccttcaagttcccattgcttggtaagaagactaaatttattgcgatcccaacaacatctggtacaggatctgaagtaactccatttgccgttatctctgataaagcaaacaaccgtaaatacccaatcgcagactactcattgactccaacagttgccatcgtagaccctgccttggtattgacagttccaggatctgttgcagcagacactggtatggacgtcttgacgcacgcgacagaagcttacgtatcacaaatggctagcgacttcacagatggtcttgctcttcaagctattaaacttgtctttgaaaacttggaaagctcagtcaagaatgcggacttccattcacgcgaaaagatgcacaatgcgtcaaccatcgcaggtatggccttcgccaatgccttcctcggtatttctcactcaatggcccacaagatcggtgcgcaattccacaccatccacggacggaccaatgccatcttgcttccatacgttatccgctacaacggtacacgcccagctaagacagctacatggcctaagtacaactactaccgtgcagatgaaaaataccaagatatcgctcgtatgctaggacttccatgctctactccagaagaagccgttgaagcttacgcaaaagctgtatacgaactcggtgaacgctgtggtatcgaaatgaacttcaaagcacaaggcatcgatgaaaaagaatggaagaaacattctcgtgaattggccttccttgcttatgaagatcaatgttcaccagctaacccacgtcttccaatggtagaccatatgcaagaaatcatcgaagatgcttactatggttacaaggaacgtccaggacgtcgtaaataagacgccaaggaacaactgatgtttatcagctacccccactcgaaagagtgggggatttttgctatttgggtccaaaactcgttttttcataaaaaattagactttttttcagaaattgtgttatttttatagcattccgagctattttatgttaccctatagtgtgtgaatctgcctgtagctgaagggttatgatcctttttcagttataggaaacgaaaaaacaaatccaagaaaggaggccatctcaaatggagttagaaggtgacgtgcaaggaagacaagatcaggcacagaaaattattaaaatgccccaacgagatcgggaaacttccacttcagaaaatcagccatcatctgcttcggtggtctccatgtatgggcaggaaaagccaagcatttctagcctccatcagcaactagcgagcgcgtctggaacccagaccattcaattgcgggaggaattggtgctggcggtagcgcagaatgcttcagcgcaagcaactgcctttgaggcagaggtcaaggataagctggaagaggccaaggagacggtttctcataaggtcgctgaggtgtcacaaatggcccacagcatggcccaatttttaacagacgcagaagtggagcaactattaggagagttctccatggatgcttgttgggaccaagcggtagaggcggagaacctcgcccaagcaaaggcctattccactcgcttgtcagatttggcaggtcagctggaggctgcatcagctcaattggtggacttggacaagggacaagcgacggcctttgatttttcataagtaggagaaaaagatgttagagatcctgggagaggacagagaacgaattgaggagctccatcgagagattaaaaaggagcaagagcggattgcgatcagaagtttgattgcaacgcagaaagccttgatgatgttggaagggatgagtttgcaggtaaccttgggcggtcaatccgaaaagatgcgctcttttgctacaacgaccctcgttagtgatttgaaagatggatttacaggaggagcagcggacgcggtagaaacagcactgaaagcagtgaagaagccgattttattgagtccgattaaaggaggtatgtgatgtaccattcaggaaatagtgaattagaacaactagaagatcgacattaccgcttcaatcaaaagctcagtgagttggagtgggattatgcggatatgcgtatggatgtccgccaacatacagaaaatttagtggactggctgagtgccttgcattttcaagcgccaagtgcggaggcccaaagtggcttggagcgtttatttgccttgcaagaagagtttgaggcagaactcaagcgctatgaagagcgtttagaagaagagcgtgagcgcgagcagcaagagtactataagcagcgtcaacaattagaacaaggtgattgaaacattcctctggtagagataagaggaatgtttttgtttgctcgaaaacttttaaaaatgtgcctataaattcttgcaatcgcttacttagtatgttataatattcacaaagaaacgaaaataaaatggttttatcaaaccaacaaaaaaggagtcgcttgtgaaagctgcaacttatgtatctgcaggcaatctgcaactgctggatcaagctcaccacccaccacttcaaactctcagaagttgaaaaagcctatgatgtctttaaacatgcgggtgaaaaccatgcactcaaggtcattatcgaaaatgacatcagtgaatgaagtggtgactaatatttgttcatagtttttttagacgggccagagatattctggtcctattttcaaccccaaaaagccaatgattccttgcaaaataaattcgttgtcttataatagaagtacagaaaacgattacataaagaggaaggtgtgatcttatgaaacggttttgttatcatcatgaattctggatggacttccatttctggatcttggtcttgcttttagcgactgtagctttaacgatgcaggctccgctttcggtagttagcctcgcttatcttgcttttgttggaattttgatccttcttcaggtctttcaaccgcctgtatcgacacggcagtatccagaaggtagctaccatttcaattggaccttctatcgggatatcagactctatatcaatctctttttactagcaggtctcttggcaggcccaatggcttcatcggatatggtctattggatcttgcttggagcagtcgtcggctctattggctttgtatttgtcgtaaaggaaaaagcgactcaaaagatggcctaaggaatcaccatgtcctagatctctgaaactagtttcagagatctttttatttttcccaaaatgcgaaactataatccaattgcagggttaatattgtaagcgttttaaaaatggattataatcaatttacaagtactcgagttgccttattatcaaaggagaaggagttatgtcaaagattacaaaagatgaattgatccagcaaatcaaagatggcatcattgtttcttgtcaggctctccctcacgaaccgctctatacagaaactggaggagtcattcctctcttggttaaagcggctgagcagggtggagctgtcgggatccgagccaatagtgtccgggatatcaaggaaatcaaggaagtgaccaagttaccgatcattgggattatcaagcgtgactacccaccagaagaaccctttatcacggctaccatgaaagaagttgatgaattagcagctttggatatcgcggtcattgctctggattgtaccaaacgtccccgtcatgatggccttttgattagtgactttatccatcaagtcaaagaaaaatatcccgatcagctgttgatggccgatatctcgaccttggaagaaggattgacggctgttgaagctggagtagactttgtcggaacgaccttatctggatatacagactacagtccaaaggtcgatggaccagattttgaactgatccatagcctctgccaagcaggagtagatgtcatcgcagaaggcaagatccactatccggatcaagccaataaaatccatgatctcggggttcgcggcatcgttgtaggtggtgccattactcgaccaaaagagattacagagcgcttcgtcgcagccttaaaatgagaaaacaaaacagtagattgaaggaggaggagaccgaatagagagtagtcgaattcatttaatgagagtgtttcagtgaaggataacgatgaagatttcaagaaggaagtcatatttgcttaactttctgcaacataaatctagtgtaaaaggagaaatagatgatatttgatgatttaataaacataaaattgtacaaagggattcatcctaatctggatcaagcgattgattttctctatgaacaccggaaagattcttttgatctcgggagatatgatatcgacggtgacaaggtctttctcgttgtccaagaaaacacccttaacaaagatgaaaatgatcgctttgaacatcatcgtcgttatgccgaccttcatttattagttgaaggacatgaattttctagctacggttcccgtatcctagatgaagctattccatttgatgaagcaagtgatattggctttgttcattgtgagaaattctatccacttcatttgggctatcataattttgcagtcttcttccctggtgaacctcatcaaccaaatggctattcaggtcaggaagaaatagtcagaaagtatctattcaaaattgcgattgattagatatgtcaaatagaaaatggaggagataagcgatatagttagttttttcggagaagttaaggcttcaaagcacagattgcattttttgtatttaaaatagaaagaggaaaacaatgaaaaatagtaagaaaattcttttcgctttggttctcgcgttattcgcattgtttgtcactgcatgttcatcttcaaaaaatgatgcagaaggaagtaataaatctggagaattatctggtgaaattgtaatgtggcactcatttactcagggacctcggttagaaagtattcaaaaatcagctgatgagttcatgaagaagcatccaaaggttaaaatcaagattgagacattttcatggaatgacttctatacaaaatggacgactggattagcaaatggcaatgttccagatattagtacagctttgccaaaccaagttatggaaatggtcaattcagatgctttggttccattgaatgatactattaagacaattggagaagacaaatttaataaaacagcattagatgaagcgaaggttgatggcaatttttattccgtgcctttgtactcacatgctcaagttatgtgggttcgcactgatttattgaaacaatataatattgaagttccaaaaacatgggatcagttgtatgaagcttctaaaaaattaaaagaaaatggagtttatggattgtctgttcctttcgggacaaatgatatgatggggacacgcttcttgaatttctatgtacgaagtggcggtggtagcctgttgacaaaagatttgaaagctaacttgacaagcaaactggctcaagatggaattaaatattgggtgaagatgtacaaagaattttctccgaaagattcattgaactttaatgtcttgcaacaagctactttgttctatcaaggaaagacagcatttgactttaactcaggattccatgtaggtggtattcaagcaaatagccctcaattgattgatgcgattgacgcttatcctattccaaaagtaaaagaatcagataaagattatggcattgaaacttctaatattccattggtagtttggaagaattcaaaacatccagaagtagcgaaagcattcttagaatctttgtatgaaaagaaagattatattagcttcttagattcaactcctgttggaatgttgcctgccatcaaaggaattagtaatgatccagcctataaagataatgacatccgcaagaaattccaacatgcagaagaagttattacaaaagcagcggaaaaaggtacagctattggatatgaaaatggtccaagtgttcaagctggaatgttaacaaaccaacatatcattgaacaaatgttccaagatattattacaaatggtaaagacccaatggaggctgctaaggatgcagaaaaacaattgaatgatttattcgaaactgtagcagttgatgttaaataataatagcagaggctacaataatgtagcctctgtttttagagaggaaaaaagcatatggtcaaaaatagaaatttgactcgatgggtgtttgtgttacctgctattatcattgttggactattatttgtttacccatttttctccagcatctattttagctttacaaacaaacatttgatcatgccgcggtataaatttgtaggattagcaaattacaaagcagttttatcggatcctaatttctacaatgccttctttaactcccttaaatggacagtcttttctcttttgggacaagtgcttgttggttttgtgttagcacttgcattgcatagagttagacgctttaagaagttatatagaacattgttgattgttccttgggccttcccaacaattgttattgccttctcttggcaatggatcttaaatggagtatatggttatctacctaatttgattgtgaaattaggactgatgaatcatgttcctggatttttgacagaaagtacctgggcctttatctgtttagtatttattaatatttggtttggtgcccctatgatcatggtcaatgttctatctgccttacaaacggttccggaggaacagtttgaagccgctaggattgatggagcttccagttggcaagtttttagatttgttattttacctcacattaaagtagtagtcggattacttgttgtactgagaacagtatggatctttaataacttcgatattatttatctgattaccggtggtggcccttcaaacgcaacaacaacattgccaatatttgcatataatctcggttggggaacaaaacttcttgggcgtgcctcagcggtaacagtcttgctatttattttcttattggcagtatgtttcatttactttggagtaattagtaaatgggagaaggagggtagaaaatgatgaagagaagaacaaatgtactccttgatattgggtcacatgttgttttagttatttcaactattatcgcaatttttcctttaatttggatccttctatcttctgtgaaaggaaaaggtgaattaacccagtttccaacaagattttggcctaaacagtttactctcgattattttacgcatgttattaatgacctacattttataaataatataaaaaatagcttattaatcgcattaacgacaacggtcatcgctattatcatttctgcaatggctgcttacggtattgttcgcttctttccaaaattaggggcgatcatgtcccggttgctagtcattacctatatcttccctccgatcttgttggcaattccttattctattgccattgcaaaagttggattaaccaatagtttaattggtttaatgattgtttatctttcgtttagtgtcccttatgcagtgtggttgttagtaggattcttccaaacagttccaattggaatcgaggaagcagcaaaaatagatggcgcgaataaatttgttaccttctataaagtggtgttaccaattgttgcaccagggattgttgccacagccatctatacctttatcaatgcatggaatgaattcctttatgcattgatcttgattaacgatacaagtaagatgacggttgcggtggctttgcgttcattaaatggttcggaaatactggattggggagatatgatggcggcatccgtaattgtagtattgccttcaattatcttcttctcaattatccaaaataaaatcgcaagtggtctttctgaaggatccgtaaaatagtaaaaataggaataggagaaaaacaatggttgtaaattatggtgttgtcggcacaggatactttggtgctgaattagcaagatatatgaaaaaaaatgatggtgcagtaattacagttgtgtatgatccagaaaatgcagaagctgtagcagaagaattaggagcacgagtggcttcgtcactagatgaattggttcaaagtgacgatgtggattgtgtgatcgtggcttcccctaataatttgcataaagaacccgtgattaaagctgctcagaatggaaaaaatgtattttgtgaaaaaccgattgctttatcatatgaagattgtaaagagatggtagaaacatgtaaagaaaatggtgtgattttcatggctggtcacattatgaatttctttaatggtgtccatcatgctaaagaattgattaatcaaggggttattggggacgttttatactgtcatacagcgagaaatggctgggaagaacaacaaccatccatttcatggaaaaaaattcgtgaaaaatcagggggccatctttaccaccatatccatgagttggattgcgttcaatttttaatgggaggtattcctgaaacagttacgatgacaggtggaaatgtagctcaccaaggagaaaactttggtgatgaagatgacatgatttttgtcaatatggaattccctggcaagcgatttgccttgcttgaatggggttctgcctatcgttggggagaacactatgtcttgattcagggaacgaagggtgctataaaattagacctatttaattgtaaaggtactctgaaagtagatggaaaagaatcatatttcttaattcatgaatctcaggaagaagatgatgaccgtacaagaatttatcatagcacggagatggatggtgctattgcctatggtaaaccagggaaacgaactccattgtggctatcttctgttattgataaagaaatgaaataccttcatgacataatgaatggtgctcctgtatcaaaagaatttgaaaaactattaaccggagaagcggcgttagaagcgattgcgtctgctgatgcttgtactcgttccattaatgaggaccgaaaagttaaattatcagagatcatgggttaataatattactgatacgacaaaaggagaaaaaatgtcagatttaaaaaaatatgaaggagtcatccccgctttttacgcctgctatgatgaccaaggagaaattagcccggagcgggtacgtgcgctggtagaatattttatcgcgaaaggtgtgcagggcttgtatgtcaacggatcctctggcgaatgtatttaccagagcgtggccgatcgcaagctgatcctagaagaagtcatggcagtagctaaaggaaaattgaccatcattgctcacgtagcctgcaacaacaccaaggatagcgtggaattggcacgacatgcagaagaactaggagtggatgccattgcggccattccgccgatctatttccgcttgccagaatacagtgttgcccactactggaatgaaatcagtgcagccgcacccaatacagactttgtcatctacaatatcccgcaattggcaggggtcgctttgacaccgagtctttacaaggaaatgttgaaaaatccacgggtgattggggtgaaaaattcttcgatgcctgttcaggacattcaaacctttgcttctttaggaggcgacgaccacattgtctttaacggcccagatgaacaattcttaggtggccgtctcatgggagcacatgctgggatcggtggtacctatggtgcgatgccagaactcttcttgaagctcaatcagctgattgttgagaaagacttagagactgcgcgtgccttgcagtttgccatcaatgacattattggagtcttgacatctgctcatggcaatatgtatgcggtcatcaaagcggttttgcgcattaatgaaggtttggacttgggatctgttcgctcccctttgacgccagtagtaaaagcggatcaagaagtgattcaacgtgctgctcaactcattcaggacacaaaagccagattcctttaatcaaaggaggtctagatgaatccatatgttgtaattgatatcggagggaccagtatcaagtatggtctagccgatgcaaaagggcaactcctagagacccatgaaatgccaacggaggctcaaaaaggaggacctcacattcttaacacaacaaaggaaatcgtagcccgttatttgaagaagcatcccttggcaggggtggcgatttcttcggccggaatggtagatcctgataagggagaaatcttttatgccggcccacaaattcccaactatgcaggcacccaattcaaaaaggaaatcgaagagacctttcagatcccttgcgagattgaaaatgatgtcaactgtgccggtctcgcagaggtcaccacaggccatgcaaaaggatcgaacaatgctgtttgtctgacgattgggacagggatcggcggttgcctcttgctcgatggtcaggtctttcatggctttagcaattcagcctgtgaggttggctatcttcatttgccagatggtgcctttcaggatctagcttcaacgacggctttggtcgagtatgtggcagaacatcacggtgatcctgtggaacagtggaatggccgccggatctttaagcaggcaacagaaggagataagatctgtatggctggaattgatcgaatggtgacctaccttggcaaaggactggccaatatcgtttatgtggtcaatccagaggtcatcgttcttggaggggggattatggcccaggaagccatcctcaagccaaaaatctatcaagccctgtgtgccgaactggttcctagcctagcagataagatccgtttggaatttgcccaccatcaaaacgctgcgggtatgttgggggcctactaccactttagacaaaaacatgaaacataaaacaagtcgcgctggcgacttgtttttgattcatcaaaaaaagcatgaaagatgaagaaaaccagatctttcatgctttttaaatagggagaccatattaagattttcgagaacgttgactagaaagttttttgttttcccagtagctattaaagacaatttccttttgttctcggcttttattaaggaaatgagcatagatcaaatcgaccacaatgaggagtggtaaaatagcagaaattcgatcgatataggtactactaggaagaggtgcggccggtaacacttctgtgaatccttggtggatggcagccgggttagccgtcacaagaaccgttttagcccctttttctttggcgtccaggagactgtctgtaatggagttggtgcctcctgacaatgagaaaccgatgactaaacaagaggaatcgagaatgctggtcgtccaagcaaagccatcttgatcagtcagggcttcacaaacgacgcccagtcgcataaagcgcaatttcatttctcgagcgactaaaccggaactaccgatcccgaagaaatagactcggtctacttgaccgattagttcagctacccgatctaattgggaatcttttaccagactttcagtgacgttactgatatggtggtagcgttgcaagacgctgagagtgagttcgtcatgcacttgcacctgtttttgatttttggtttcttcgttaaaatgatagacaaactcccgatagccggaaaaaccacatttttgagagaaacgcgttaaagctgcctttgaaacatggagtaactccgttacacgagaagaggacagggagtgctgtcgtgcttcggatgataaaaaatattgggcaatgtcgcgttccatatctgttaactcagcttcatggctggcgataatggcgcgtaaatcttggtcttgtttcacagcaatcctcctttctcacgagatgaaataacaggatactcctataatatattacacattataacatgggtaaccgctttattcaagtaaaagaaatcaagaaatactgaaactaggaacaggataggagaaaagaagagaacgcttccaatcctggcagtagtggcttgttggttatccacaattttctgaaaatttccggttgggcctgaacaaacgatatgaattgtggtataatttaagataattgtactgttgttggaagaacaatggttgaataaggaggtgtgacgatgtcgaatgcaacactcgagatgatgcaagagatcgagcaagctgctcagggcgtgatcgtaggctatgaagctcaagttgaacaaatccgaacggattcgcgcgatcgacttgcaacagtggcacagcattacgatgaggaaaccaagcaattggtcacagaggcagaaaaaaacgcccaggaaagactcgtccgtttaacgaaagatctggaagaaacggttgcgcgcaatgatgccagggtacaagaggcgatgaccgataaacgagctgggctagttgaagccattgtagaaaaggtggtagcaagctatggccgttagtcagatgcaaaaactgtccctcatcttgcccaaagatgacttggacagtctcctactagcgctacagtctgaggcaaaaatccagatttatgacctcagtgagcatgaagaatggcaggctgcctttgaggcaaataccttgtctcaacccttgacagaggacaatcgtcaagctttggtagagctgcaaaaacgtcaagaacaagttgaaaaaatgattcagactctggagccttatatgcctgagaaaaaggccctgcaagccctgaaggaagaacccttaagcttgtcttttgatgacttgcaggcccatgggatgattcgagatgaggatctcctattgaccaagttgaaacgccaattgcgcgtgttagacaaggcttgtcagaagattgcggatgcaaagggagagatagagcgcttagaaaaatggcgaccgttagaggtgacgccagctgctctcgctaattttcactatgtgcatggcttgatcgggaccattcccaatagcgatacagacgctgttcgttcttccttaaaagctcatcctgagctggagttagaagaagtctttacatctgaaaccgaacacggctatgtcatcttgtatcgttcaggagatcgtgtagctgttcaggagcttctagaagaccatggattcaaagaattggactatgaagaagagcaggtcccggccgcctacttggatcgcctagaaggggaaatcaaagagcaagaagctgtagttgcagcaaccctagccgagttacaaaactcccagaaggagctggaccagctcaagtaccagatggattacttgctgagttcgggagctcgggaggaagccaagtcgcttcttgccagcacgcaaagcttggtagctctagaggggtggattgaaacctcccaagtggcctcattacgagacttcttgaaagaaggttttggttctcgggtcttactagagacacgcgatgtgacggaaaaagattgggatgacgttccgatccagttgcgaaataatgccttggtagagccctttgaattagtcacagagatgtacgccctgcctaagtattacgagaaagatccgacaccaatcgtttctctcttctactttgttttctttggcatgatggtcgcagatatcggttatggactgttgctaaccttggcgacaggctttgcccttaaagccttcaagctcaagcctggtacagccaagaaccttcgtttcttcagtctcctcggaatttcagttgccctttggggtgtggtctatggctctttctttggatttgagatgcctttcgccttgatcagtacgaccagcaacgccatgaccatcctgatcctctcagtggtctttggttttatcaccgtcttagtgggcctcttcctaggaggaatgaaaaatgttcgcctcaaagactacaccgaagcctataatgctggctttgcttgggtcttgatcctacttggcttaatgcttctagcagtaggcaatatcttgccagggatgagcgttctagttccgattggcaagtggctggctattttgaatgccattgggatcttgattgtttccattgtcagtgccaagaagttgtccggtctagcctctggtctctttaacctctacaatgtcagtggctatgtcggagacttggtcagcttcactcgtttgatggccttgggcttgtctggagctagtatcggttcggcctttaacctcattgtcaatctcttcccaccgcttggacggtttacggtagggcttctgctctttatcgtcctacatgccattaatatgttcctgtccttcttgtcaggatatgtgcatggagcccgtttgatctttgtggagttcttcggtaagttctacgaaggaggaggcaagccatttcgtcctctcaaaccttctgaacgctatattaaaacaaaaaaataagtattatctttaataaataggagtatattcatggaatctttagcatcatatttttcagcccatgggggcgccttctttgcagcgtttggtgtggcgatcgccgttgcacttagtggaatgggatctgcccttggggttggtaaaacgggtcaagcagcagcagcactcttgaaagaacaacctgaaaaatttgcccaagccttgattttgcaattgttgccaggtacacaaggtttgtacggtttcgttatcgggatcttgatctggttgcaaattaagccagatatgccacttgaaacaggggttgcttacttctttacagctcttccagttgcgattgttggttatttctcagccaaacaccaaggaaatgttgcgacagcagggatgcaaatcttggccaaacgccctgaagacatgatgaaaggggttatccttgcggccatggttgaaacctacgccatcttggccttcgttgtgtccttcctattgaccctacgcgtcggctaagagctagctttgatggattcgcctttcgaggcgaaaaacacaagacgcatgcaataggagaaaaaacgatatggatgaacaaacccaattaaaggattcgatcttggcccaagcccacgaaaaagggcgtaaactcttagaagaggccaaggaaaccatcctaaaagaggagactgcacaagaagagcgtttgatccaagataaactcaatcaacgctccgagcagctcaagcggattcaacgtcaattgcaacgtgaaacccaacaaatcgaaaataaaaaacgccaatcaacccttgtcaccaagcaacgagtcttaaaggatctctttgcagatgcttatgaagcgatggtggcttggccccttgaaaaggaaatgcagtttgtagatgcggtcttagatcgctatcagggacaagttgtgaccctgaccttcggggcggtgagcgctgctaaatttgattcagcagctctcgagagattgaagcagacgcatcagaatgtgacagttgcagatgcaacaatcccagctcaagcaggttttgtcttgtcggttgggaagattgatgacaactatctctacagtgatttggtggattccatttgggagcaagaaagctaccagatggcagccagcattttcacagatgaagagaactaggaggttgcaatgagcgaacggacctattctcaagtcaatacaggaatcagcgtacgtgaggctagttttgtcagtcccagtcagttcgagcagttgcttgcaagtccctcaagcgagagccgagaaggcttgctacaagggacaccttatgctctagatagcaaggagatcaaggatttatcagccctggaagctcacttaatggcagccttgttggcagaataccaatgggcttttgaggtaagtcctcagtcggacttggtcagcctctttaccttgaaatacacctatcataatctcaaggtttatctaaaacacaaggcgacagagcgaaagttggggcacttattgatccctatcggaccttattctctcgatgtgctcgagcatttggtggcgaccttttctgcggagcattgtccggcctttatggcggaagaagtggctgcaacctggcaagaattccaagactatcaggacttgcgggtcctcgaaatagggatggacttagcttattttaagcacctgagatacttaggggacagcctagatcatctgattctgaagcagttggtggacgtgaccattgacttttacaatgcgattacggtcaagcgggccttggatcagcaaaaaccgcatagttttatgcaccaattactctcagatgaagggagcctcagtgcccatcaggtgatcgacctgctagaatccggccagtggttgacctggttttatcaagtcaatccgctggagtacgatctcgccttagagacttatgaagaaaagatgcgcaccggtcaactaaagaccgtagagttggagtatttagagagtttggtgaaattcagtcttctagacgctggccgttttgaagtcgatggacccctaccccttgttcgttatctttacggaaaagagttagaggtgactaaccttcgtttggtcctctctggtttggacaatggttttccgctagcagacatcaaagaaaggatgagaccgatttatggacaaacagacctataagatcgccgttgtgggcaatcgggacgccatccttccttttcgcttgattggctttcaaacctatccggtcacagagccgcaagaagcgatcaataccttgcgaaaactcagtcgggaaaacttcgggattatctacctgacagaggatattgctcaggccattccagatacagtagctttttacgaccagcagctgacaccggctctgatccttatcccgacccatagagggactacaggactgggccaacagcggattcgtgataatgtcgaaaaagcagtaggacaggatattttatgagaacaaatgaatttggccaagcgattggcgatgcactgccggattttacaccggggcttctgccagctattgagcggatcgaaggtcgctataccgtgatcgagcgcctctcaaaagaaaaacatggagcagatctttatcaggtctacgggccggactctccagcagcgatgtggacctttctgttcaaaggccctgcccacaatgaagaggagtgggaccatctattagatgatctcatgacagcccaaggtcgcttttactatgcgattgtagacaaagattcaggcaaggctttggggactttctctctcatgcggatcgatcaagccaaccgggtgatcgaagtcggagcagtgacctactcaccagcgctccaaaagacacgcatggctacggaagcccagtatctgttagcgcgctacgtgtttgaagatttaggctaccgccgctatgagtggaagtgcgatgctttaaaccaagcttctcgcaaagcagctgagcgcttagggttcacctatgaaggctgtttccgtcaggctgttgtttataaaggtcgtacccgtgatacagactggttgtctatcattgaccaagaatggccagctatcaaacagcgcttcgaaacctggttggatccaagcaatttcgatgccaatggccaacaaaagcaagctctaagagagatagcacaaaagtaaaacaaagaaacaaaggattcccaggaggaatacatgactcaaggaaaaattatcaaagtttccggtcccttggtggttgcatcagggatgcaggaggccaatatccaagacatttgccgggtcggcgatcttggtttgattggcgaaattattgagatgcggcgggacgaagcctctatccaagtatatgaagaaacgtctggagttggtccaggagaaccagtggtcacaaccggagctcccctttctgttgaattgggaccaggtttgatctctcagatgtttgacgggatccaacgccccttggaacgcttccaagaagtgactgccagtgactttttggttcgtggggtgcaagttcccaatctagatcgggacaccaaatgggcctttgaaccaagcgtgacagaaggaacagaggtggttgcaggagacatcgtcggtaccgttcaagagaccaatatggtggaacaccgcatcatggtgccctgtggagtcagtggacgtgtgaccaagatcgcagcaggttcttacacagtagaagagccagtctatgagatcgagcaggcagatggcagtctctttactggtactttgatgcaaaaatggccagttcgtcgaggccgtccctttgcacaaaaactgattccagtagagcctttggttaccggtcaacgggtcatcgataccttcttccctgtgactaaaggtggagctgcagctgttccgggtcctttcggagctggaaaaacagtcgtgcaacaccaggtggccaagtttgccaatgtagacatcgtaatttacgtgggttgtggggaacgtggaaatgaaatgacggacgttctgaatgaatttccagaattgatcgatccaacgaccggtcaatccatcatgcagcggaccgttctgatcgctaatacttcgaacatgccggtagcggcgcgggaagcttccatctacacagggattactattgccgaatacttccgtgatatgggctattccgttgccatcatggccgattcgacatcgcgctgggcggaagctcttcgtgaaatgtctggtcgtctagaagaaatgccaggggatgaaggctacccagcctaccttggtagccggatcgccgaatactacgagcgtgcaggtcgggtcaagacactcgggaccactgcgcgtgaaggttcgattaccgccatcggtgctgtttctcctccgggtggagacatttcagagccggtcacgcaaaataccttgcggattgtcaaggtcttctggggcttggatgctcaattggcgcaacgtcgtcacttcccagccatcaactggttgagttcttattcgctttaccaagatgaagttggtcgctatattgatctacatgaacaaatcagttggtctgaaaaagtgacccgcgctatgaatttacttcaaaaggaaagtgaattgcaagaaatcgtccgcttggttggtctagattccttgtctgaaaaagaccgcttgaccatgaatgcggctaagatgatccgtgaagactacctgcaacaaaatgcctttgatgaggtcgatacctatacctctttcagcaagcaggtggccttgttgacaaacattttaacctttgaccaagaaagtcaaaaagcattagaattaggggcttacttcacagaaatcatggaaggaaccgtggctcttcgagaccgcattgcccggagcaagttcatccatgaggatcagttggcaaccattcaagccctgaaagaagaaatcgtagaaaccctacaccaaatcgtcgcaaaaggaggagtagacaatgagcgtgattaaagaataccgtactgtcagcgaagttgttggccccttgatgattgtcgatcaggtcgaaggggttcactacaatgaactagtagaaatcaaactccatgacggaacgacccgtcagggacaagtcctcgaagtccaagaagacaaggccatggtccagctctttgaaggatctagcgggatcaacttggaaaaagccaaagtccgctttaccggacgtcccctagaactccctgtgtctgaagacatggtcggacgcatctttaacgggatgggcaaacctatcgatggcggtccggagattatcccagagaaatacttggacattgatggacaagccatcaaccctgtttcacgggactatccagatgaatttatccagacagggatctcagccattgaccatttgaataccttggttcggggccaaaaactcccagtattctcaggttctggtcttcctcacaaggagttggcggctcagattgctcgtcaagcaacggttcttaattctgaagaaaacttcgccgtggtctttgcggccatggggattacctttgaagaagccgagttctttatgaacgaccttcgggaaactggggccattgaccgctcggtcctctttatcaacctagccaatgacccagctatcgagcggattgcgactccccggatcgccttgacagctgccgaatatttggcttatgaaaaagacatgcacgtcttggttatcatgaccgacatgaccaactactgtgaagcccttcgggaagtatctgctgcccgccgggaagttccaggtcgtcggggttatccaggttacctctataccaacctctcaaccctctacgaacgtgcaggacgcttggttggaaagaaaggatctgtgacccagattccaatcctctctatgccagaagatgacatcacccaccccatccctgacttgacaggctacatcaccgaaggtcagattatcttgtcccgtgatctctacaatagtggttaccgcccaccgatcaatgttcttccgtccctttctcgtttgaaggacaagggttctggtgaaggcaagactcgggaagaccatgcggcgaccatgaaccagctctttgcggcttacgcccaaggaaaacaagccaaagaactagctgtagtgcttggagagtctgccttgtccgataccgacaagctctatgttaaatttacggaccgctttgagcaagaatacatcaaccaaggctttaccaccaatcggacgattgaggaaagtttggatctcggttgggaactcttatccatccttccacgaacagagcttaaacggatcaaggatgagatgattgacaagtatcttccaaacaaagaggattagcctatggcacgattaaatgtaaaaccgactcggatggagcttaatattctcaaagagcgcctcaagacagcaacccgggggcacaagttgctcaaggacaagcgggatgaactcatgcgccgctttattgaagctgtacgtgagaataatcgcctgcgccaaaaggtggaggcagcgctggtgggcaatatgcaagatttcgtgatggccaagtccttagagagcgacctcatggtagaagaaatcttcgccgttcccactcgagaagtgatgctccatatcgaggaagaaaatgtcatgagtgtgcgcgtgcccaagctccatgcccgtatcgaaaatccatacggagatgatgaaggagacgtagtttatagctacctcgcctccaacagtcaaatggatagcaccatccaagaaatgggggatctactcccagatttgctcaagttagcggaaatcgaaaaaagctgccaactcatggcagatgaaatcgagaaaacccgccgtcgagtgaacggactggagtatgcgactatcccagacctcaaagagaccatctactatatcgaaatgaaactcgaagaagccgaacgcgccaacctcgtcagaatcatgaaggtaaaataagatacaaagccgttaagcaactcaaaggaaaataggaaatccaacgacgaagcgtccgcttctagttggatttatctttttccaaagagttgtaggcgtgttcagttataagatacaaagcccgtaaaatgcaaagtgaaaatagggagcaggacagaagcactgttgtatagaatgcttcgttgtcctgcccccacaaggctgattaggatttttccgagctcttaaagcgagagaaaaatccaatcagctactgtgtctttgaagttagtactattacagtttgcgtttatcacacagcatttagggcgtgttcagttataagatacaaagccgtaaaaagctatgttcaattacttaaaaaatacaagaacctcatcgaggaaccgctccttgatgaggctttttttgcgccctcgaactcttcttccaggaccctaattttatgttactagtttgtaacaatgtgacaagaaagacgaaatgttacaagaaaaatacagttttgttaaatagccaaaaaggccttttattatttttaaattgtgataagatagtatggtagttaatttgtccaagaaaatcttgagcaaaaaaacaaagaaaaaagaggataaaagatgaaattaaaagttaatacgaaagccttgatcgcttcaacagtagctcttgcagtgattccatttacaaaagccactgcagaaacacttgaagattgggtagctcgctcagtagatgaaatcaaacatgatatccaacaaagcggtgaaaaccaacaaacttataccatcaaatatggtgatacattgagttcgatcgcagaagcgcttggaatcgatgttcatgtgttggcaaacttaaacaacatcagcaacatggatttgatctacccaggtactgtattgaaaacaacagtaaatgatcaaaaagaagtaacttcagttgaaatccaaactcctcaagcaggtgcgacagatgcaaccgttgcaagtgctgacttgacaacaaaccaagtgacagttgatgaccaaacagtcgctgtcaacgatttgtctaaaccagtaaacgaagataataaagctgtaccagttgctccagcagcagaaactcaagaagctccagtagttgaagtaccagcaacagaaacaccagcacaaccagctgttccagaaacaccaaactacggtgctccagctgtcaatgttgaagtacaaaatcaagaagtagcgccagctgctgctcctgaagctccagcaactcctgaagctccagctgctcctcaatctgctccagtagcagaagaagctccagcagcacaaccagcagcagaaacgactgcagcaccagaagtgcaaccagtagcagaaacctcaacgagcggaaatacgattccaaatgatccacaccttcaaccacaagcagaagctttccgtcaagaaattgcagcgaaattcggtatcacaaacattggtggttaccgtgcaggtgatccagacgatcatggtaaagggcttgcagtggacgtaatggtaccaaccagttcacaactcggggatcaagttgcccaatatgctattgacaacatggaccgtgcaggtatctcatatgttatctggaaacaacaattctacatgccagtagacaacatttacggaccagctaacacttggaaccaaatgcctgaccgtggtggagatacagcaaaccactatgaccacgtgcatatctcatttaacggataataaaacattgaactaggcctagagcctagttcttttttgtgtgcacaaaaaaagccggaagacgaatcttccagccggacaatggttataaaatatgatcgactttttccacctgataaagggcaatcgccatgataatggttaagaccagtagcatgaggatagctggtgtccaagagtggaagagagatttgctgtagccgaagaggatgggaccaaaggctgcaaagacgtagcctcctgtttgggcaagaccggaaagttgagctgttttttcaggtgtgctggatttcatagagaaagcgaccatgaggtaagggaaaagggaactaacggaacttccaatcagggcatttaataccaaccagtagaagaagttgctggtcgggattaagagcatggctacccccagaatccctgctccgacaacaatcgtcagcatcaagcgtcgattgcgatcggataaccgtgtcgttaaacttgggatcgtcaaggagaatgggagactgatcagggtgaacacggaggccagtagtccagattcaacctttgaaaggccagcttgaacagccatggtcggaagccaggtcatacttgtgtagaaaagcagtgactgcaagcctccaaaaatcatgatagcccagacatatttattggtataccacttgctactagattccgtagtagcagcctttttgagtcggtggttgtagcgaaggttaggaatccagatgaccaaagcaagagcacacaaggctgtcaagatgttgaccaaaccttgccaagaagtggctttggtgatcggaacagcgacagaagaggcgatcgctgtggacatccccatagaagtgatgtacaaagtggtcagaatgcctagttggcggggtctgttcgcctgaatcaggcttggaagcaacacattgagaaaggcgatgccagctccaatcaagatggttcccagatagaggaaggggaggttgataatccgaatggcagatccgatcgtaatcgcgatcaaaactagaaaaaagaggcgctcaatccccaactttttagcaaattgaatcgcaaaaggtgagaaaatggcaaacgtgagaagtggtaagctagtcaatagtcccagagagctcacatctacccccaaaccagcagcgatgtcagacaagaccgtcggaagcgtagtaaatggtgttcgtaaaacaatcccaagcataatgatgcccgggatgaatagcgtagaatgtgtttttttcataaatcctcctcagacaaaaattcccttcattataacatagatcgagcataaattggagtatttgtacaaatgaagggtaaggaccgtagttctcactatcgttcgaactgcgtcaacgtacctaaactcgtctatgcccctattgaacttgactcactatgaatcgtaaggaacgtagcgttcgaactgcgtcaacataactaagctcattaacgtttgctaaggtacgtagaaaaagccaccggttttggtggctcttatagggagattattatgaaaaagtttaggattttctatcaaacaaagttaggaggtctttatttgatggttttattataaggcggtttgcttaaagaaaacttaagaaaagattgtgtttaaaaaataggtcttaagtctgacaaaatgcattaatcatcattccaaacagtaaaattacttattccattctaaggatcgtagttctcgctaacgttcgaactgcgtcaacgtacctaagttcactaacgtttgctaaaggaataaggaacgtagttttcgcttcgctcaaactgcatcaatatctctaaattcggttgaactctctgagttcacctcattaagagatatagaaaagccaccggttttggtggctcttatagggagattattatgaaaaagtttaggattttctatcaaacaaagttaggaggtcttcatttgatggttttattataaggctgatttcttaaagaaaacttaagaaaagacgctgtttataagaatcggtcttaggtctgataaattttttacaacagaaactatttagaattttttctaaatagagttgacaaagccatccgaaagtactagaatctatttagaaagaaatctaaatagattggagaagatagagaatgaattttgcgcaaacatttaaagctttatcgaatccgataagaagaagtatcttagagctgctaaaggcagggaaattatccgctggcgatatcgctggccactttgatgtagcaggagcgaccatttcccatcatttaagcctcctcaagcaggcagatttaattcgagaggaaaaagagaagaattttatctactatgaactcaatacttctgtcttggaggatttaatggtctgcctcgttgatttgaaaggagactctactgatgaaaacgaataaaaaactattgctattaacttctatggtgatccttttccccatgctttgggggctgatgatttggtcgcaattgcctaaccaaatcccgattcatttcaattttgctggccaggccaataacttccaatcgaaacccctggttgtgtttggtcttcctattttcgatctcatggtgcatctgtttatgatctttatgatcggacgtgatcctaagaatagcgctatgaatgaaaaaatgattagagcgatttactggttgaccccaatcgtttccttaagtacctcctatctcatttatagcaaggcgctaggatctactaccaatccatctgtttttgtttcggtgttgctgggtcttatctttgtgatcatgggcaattacatgcctaagttgaaagtgaatcacacggttggaatccgtctgccctggaccttgcagagtgaagataactggcacaaaacccatcgcttggcagggaagttgtgggtcctcggaggcttgatccttctgcttgaagcaggccttcaattcgccctttcttatgttttggcgctggtcatcctcgccattgtccttatccctgtgatgtactcttatcaattaagtcggaaaaatcgttagtatgaaaaacaaccagagaagaagccagtcgggaacggtttcttttccggttgtttttgcttgttcatcgtttcaaatttaaaactttcaggaaaatacttatttttcggaaagaatctattaggagctgatatactatgctatactatatatagcagtttatctttttttgaaaatttaggttatggtttttatgagtaaaaaaattctctttattttatagtttacgaggtgaataaattaagaaaaaaatatatttgaagggatgggtaggataccctattttgatacaatagggaaaaatgattcgactctaatatcgtttaaaaaactgaaaaatttggttgtgaaggagtgacatatgcaagaatttacaaagataactattgaaaaagactacttaccttataggaagatagaactaaattggttgaagaaagaaagcaatccggatactgaaatactcagaagtatgattatatttggaagaaatggaacagggaaaagtactatttctaaatctatttctagtttaagagacataagtgaggatattacccttattaatgaaaaaaatagagtgagtaacacgataaatattactgatagagataaagaaactatatttgtatacaatgaagaatttcaaaatgaaaaagtaacttttatagaaaatgaaagatttgaagcaattgttcttattgatgatcaaaaagatttaatgtcgaaaatagcgttaaacaaaagtgaagtaaaaagattagagtctaaattgactcaatataacgatgctctttcaactgctgaaaatgacataaaagaaagtattgtaggcacgaaaaaatcaaggtggaagagtatttttagtgaattaaatgataaaaatccatactttaatgctagtttaataaatagaatttctagttctgtatcttcaagatcagtggtagaattaggggagaatcttagtaatctgataaaagaaatagaatcagctaagaatgaaaaaaggattaacagatgttcggaagtagaaattcccattaatgaaataaaaaacaaattaaaaattattgctgagccagttagtatgatagagctaaccgagagagagaatcagattattgaaatacttggaaataatgttgacagtagtatagaaaaaacagaaaatatattaaaagggaattcaaataattgtccaacatgttttcaggaaatcaacgaggattataaacgagatactttagctcaattaaaatctgttttgaaaaaacaattgttaaataatgagatatctgaacatatgactggtatagagacagctgagaaagaggaaaacttctattctacgcaacttacaaaaatatatgactttgcttgtattgaggatgaggaatgtgattttgcaaaagaattttctccatatataggtaacgttatgagacgagtgttggaagctttttccacatttaattatcaaaaagggatatcagagttaagttcgaatgaagtattattaagtgaatcgattgatgatagagaggagagagagcttctaaaatctcatatgtatagattgcttttgaatggagaaagccactattcagataaaatttatggaataactgaaagagatagagaagtattgttgacaattaaacaaaagattcaaacagctagatttgtattagttcttttatatagtcttaatccaattcatcttaaataccaaatcaataatttagatcaaacaatattagaaagatggaaatcggatcttataggtagtaaaaaataaagataccatttctactcatcataaagttgaaaaagtttctccttttaaaacaatttgaatgaaattttttcaaattatttaagtaagtgaagtacgtttaatgttgttatactatgattctgaaatatgttaaaatacttctctatcaaaccaggtcttaagaaagctcgtaaagcatcacaattatcaaaacgttaatcaacacgcttatatcaacgtttacagacatttaagaaatttctcttggatgtctttttttgtctagctaaattttacaaattgggcaatttaggttactcaataatataaaaaagataaaaatttaaagttcgaattttaattttaaaaaaagtaattattattgaatatctgttcaaacattttttcttttctaaggttaatataagtatatatactttaaaaaaggaagtcaaacatcttgctcatagatttttgcatttttaaaaaatacattttgtcatataataatgtggaaaattgacggattccttacataatcatataatatgaatatgtaaacccttacatactattctacttatacttgataaaatgcaagttcttgaggatctataaatatatagacactcttctatttataaagtgaaataaagaatcacggagaaagtttatggatattaaagagacattcaaccagctagacaatacaaaatttaatgatttcaataatcgccttgaaggttttgagaaactttttaaagacaaatattattttacccatcccgaagattttagctcaatctttagcattttggtaaagtatggaaaaagtacaagtaaatatattttatcgaaaggagagatatatgagtgaaatagttattaatgctcagaatttatctaaaaatttttataattttgattcaagactcccatttatcaagagatttttgaaacgtaatcaaataacgattcgagctgttcaagatattagttttacgattaagagagggagtatagttggctttattgggagtaatggagctggtaaatccacaacgattaaaatgttgactgggactctttatcctagttccggaaaattagaagtgaatggagaaattccatttaaaagaagtataaattttagaaaaaaaatttcaatagtagtaggaaataaattacagttatttcaagatgtttcggctatggattattttcaattgattggtactttatatgaggtagaaccggcgattttacaagaacgaattcaggaattaagcaatttgttgaatgtaaaagatcagctttaccagcaggtccggaccctctctcttggacaaaaaatgaaaatggagtttatcgcggcatctttaacaagtccggaaatattatttttagacgagcctactatagggttagatatacagtctaaaaaagatatcagaacatttttaaagaaaatgaatgaagaatgtcatactactattattttaacgagtcatgatatggatgatatttcgtctgtttgtgacgaattaatcgtcattgacaaaggaaaaattattttgcaggagtcaatggatgttattttatctaaattttctgattttaaatatttaaagataaaaatgacattagatttggtaccagagttatgctctgttaaaggagtagtagtcatttctcaaacaaaatcggaatgtatactaaaaatacctagagattttgtctttgagacattagaatcaatcaataagcttgtagatatagaagattttgaaatatcaaatctttctttagaagaaattattttacaaaactattttacaaaaaaggagcacaattgaaaaaagaaatgtctattattctgatatcatttcgatctattttgaactataaatcaagtgtactattgttaatgttacaggcaagtatacaaattatgatatcagtatttttatggacgtatatatatcagagtaaccagataaatatagcaggatatgattttacctcaatggttcaatactatttggggactataattttttcatattttgttttttatccagttgattgggaaatcaatgacgatgttcattcaggaaatttttttagcatattaataaaacctgttactttttataagtattatttttgtaaaatgcttggagataggcttgctcatttattatttatcatcattcctgtcattttattctccagtgtttattacaagaatgagttattaaccattgaaattcttatttcaggaagtattgcaattattctatctatggttctatggtttttaatatcatgttgtgtaggtatgctttctttttggttagaaaatatattttttgtccttactgttaaagaaatagtaattcagtttttatcaggaatattattgcctttaagttttttttcaaataattttcgtctgtttttagatgtattaccttttaaatacttagtatatgaaccgcttcagatgtttagtaatgatacatataaattaatagactatttgagaattatttgtattcaattgatttggtgcatcattttttatattatatcaagattcatattgagaaaaggagtggagcacttctcaaatgtgggaggataaaatgtttagaataaaagtaatttttaggctacttcattttggttttaaatctgatatgaattttcattttgacttcttttgtggtctattttcgtcgatactgtggattggtttacctattgtattttttagattgattttcttaaacatagactcttttaatggttgggactattatcaaattttatttttggtaggttcctacactattgtagatggagttatgatgggattgttaattagaagtatgggaattttagaatcagatattttgagtggtaacttggatcaaattttattgaggccgtttgatactcagttgttctatatttttagatcatttaatttagttcaattcgtgaatactttttttggtcttgcgatcatttttataagttatggaaatttaaatgtacatttaaattcattaaaaatattattttatatcctttctttaatgtgtggttgtattatatattattcaatttggtttctaataacgattagttcattttggttcccaactaaattttcaaaagtagatgtatttttgaattatattggaatttctaagtatccatataatatttttacaggtattaacagattgatcactatgttatttgttcccaatttattaattgccaatcctgcagtattaatatttttagggaaagatacattgaacctatttttctatcaaatagtttttacagtttttttgattattatcagtcgtacaatttttagaaaaggattgaaaaaatatgaaagtgcaggaagataaacaatgttgttcagttatatgtttgactaaaggaagtgattcgctgtactttgttttgtggtcattgaaacatcagataattataaactataatttaaagaatagtattattaacttataggtgctaagaaaaaatttaaagaaattccctcattcaatcaaacttattcatattttttaaaataagaaaatagttggattttgatgatggttgatataaagctaaactgaaagtacctgaaatacaactgtgtcaaaccaggtcatacgatctgtgagaaaaagaacacataacaaaaagaggagcttcacaataaagttcctcttcttttatatatccgaatcattattcttatttcaaaaaaggtagtgaaaaaggtagtgattcggttgatttatattgcaatgtagtgaaatttagaatttcaagaatcgcttaaaatcaaggtttctaacatctattgacgtgtagtgaacccctatttcacctcagtaaatacaacgtgtttgcgaagttttggtgagtatttcttcaattgaagacggtctggagtgttacgtttgtttttagaagtaaggtacaagcgttcaccagattctttgtgttcaagtgtaatatttacgcgcatggtatctcccttctattattcagctgatgcagctttagcgatcttacgtcctttgtagtatcctttaagtgatacacggtgtgaacgtgagtaatctccagttgcttcgtcaaagtttacagatggagctgttactttgtagtgcgtacgacgtttgtttttcttcgcttttgatgtgcgacgtgcaggtactgccatttcgtttttctccttttaagatataaattcaattaggtttgattttcatcaactttaacagtataacaaaacttttttgtaaagtaaagttacttgacaaaaaaattgaaatttttgaaagaaacttttctgttgtctgttcctccaaagtccttgcctatctttgtggcctcttttatgctataatggtaaaaaatgaaacgagaggaatgacatgacagaattagacaaacgccatcgtagtagtgtctacgatagcatggtaaaatctcccaaccgtgccatgcttcgcgcgacgggaatgaccgatgaaagctttgaaaaaccgattgtcggagtgatttcgacatgggcggaaaataccccttgtaacatccaccttcatgattttggaaaattggccaaagaaggtgtgaaagatgcgggagcttggccggtccaatttggcaccattacggttgcggatgggattgctatggggactcctggtatgcgcttctccctaacgtcacgtgatatcatcgcggactctatcgaagcggctatggggggtcacaacgtggatgcctttgtagctatcggaggctgtgataagaacatgcctggttccatgattgccattgccaatatggatatccctgcgatttttgcctatggtgggactattgctccggggaatctcgatggaaaagatatcgacttggtttctgttttcgaaggaattgggaagtggaatcacggcgatatgacagctgaagaagtgaaagatcttgaatgtaacgcctgccctggccctggtggctgtggtgggatgtatacggccaataccatggcgacagcgattgaggtccttgggctaagcttgcccggttcctcttctcaccctgctgaatcagctgataaaaaggctgatatcgaagaagcaggtcgtgcggttgtcaagatgctggaaatgggactgaagccatctgatatcttgacccgtgaagcttttgaagatgcgattaccgtgaccatggcgctgggtggttccaccaatgccacccttcacttactcgcgatcgctcacgcagctaacgttgacttgacgcttgaagacttcaacgatttccaagagcgtgtgcctcacttggcggacttgaaaccttcagggaaatatgtcttccaagacctttataatgttggtggtgtgccagccgtcatgaaataccttcttaagaatggtttccttcatggggatcgcatcacttgtactggtaagactgttgctgagaacttggaagccttcgctgatttgacaccgggtcaaaaagtcatcatgccacttgaaaatccgaaacgtgcggatggtccattgatcatcttgaaagggaacttggctcctgaaggagcagttgccaaagtatcaggtgtgaaggtccgcaacatcacgggccctgctaaggtctttgactccgaagaagctgccattgaagccgttctttcggatgaaattgtggatggcgacgttgtcgttgttcgtttcgtaggtcctaagggtggtcctggtatgccggaaatgctatccttgtcatccatgattgttgggaaaggccaaggagacaaggtagccctcttgacagacggacgcttctctggtggtacgtatggtctcgttgttggtcacattgcgcctgaagctcaggttggtggcccgatcgcctacctccacacaggggatttggtaacggttgaccaagataccaaagaaatcaccatgcacgtttcagacgaagagttagcgaaacgcaaggcagaaacaaccttgccgccactgtatagccgtggggttctgggtaaatacgcccacatcgtttcttcagcatcacgtggtgccgtaaccgacttctggaatatggaacagtctggtaaacagtaattacaaggacgactttgtccaaagagagagtgggacagaaatcggtaattcgttagaattcgatttcgtcgtcccacctccgcacagttgagtagggctgtaaaagctgatgaaattagtgtagtagagcccactcaaccactgcgtcttgctcgacaatccaaaaataattgagaggctaggacttttgtcccagcctcttttttggctcaaagtcgctatttttaaccctgtcgctgaagcgtatgaatattactttttgggagatttgagtgtattatctgtcatttttcttgtaaatccgtctataatttgctataattgtgactaatcgaatcaatcctttaatactgtccagagaggcaggcaaggagctatggaaatgaaaggcctgggaagaccagcctatattttgtgtatctccttgttgtgggggatttttttgtatagttgaaaagtggtttgatgaaaaagagaaatcgtcgatgatggagcatgaagtactcctttacgatttggtcatcgaaggtagacgtttttgttcagccatagcttgtcgcatcttaattttaggaggtttttacgatcgtgaatgacgttaaatatgatgtgaatgatatgccaaaaccaggcttgctggttggtttatctttccagcatttgtttgccatgtttggggcgacagtgctggtgccgattttggttgggattgatcctgccattgctttgttctcatctggtttggggaccttggctcacttgacagtgaccaagtataagattcctgcttacatggggtctagttttgcttatattgctgctatgcagatgttgatgaagacagatggaatcgcagcagttgcccaaggtgccatggcgggtggtttggtctacttgtttgtagctctgattgttaagcatgcgggtaaagattggattaataaggtccttccaccaatcgtggttggtcccattatcatggtaattggtttgagtcttgcgaagaatgccgtcactgatgcgacaaccttaaataatagctacagcggctatgctctattgatttcgatggtgaccctctttgcggttatcctatttaacatgtatggcaagaagattgtcggtgtcgtcccaattttacttggattaattgtgggctatattttctcattggctcttggtttgctgacaggacatagttttgtcaatttctcagaggtaagtgcggcgcattggattcaagtcccaaactttgacattccatttgtggattatagctttaagctctatccaagtgcgattttgaccatggctccgattgcctttgtgaccatgacggaacattttggccatctcatggttttaaacagtttgactgagcgtgattacttcaaggatccagggcttgaccatacgcttactggagatggcttggcacagattattgctggattctttggagctcctccggtaacctcttatggggaaaacattggggtgatggcccttagtaaggtctactcagtttacgttatttcaggcgcagcagtgattgcggttgtcatgagctttattgggaagctatcagcactcttgcactctattccaactcctgtattgggagggttgtctattgccctctttggggttatcgctgctagcggtttgaaaattttagttgaacataagattgattttgataataaaaagaatctcttgattgctagtgtgatcttggtatcagggatcggtggtttgatgattgacctcggtggtcttcaaatcacgggtgtggcaacttcaacgattctaggaatcgtgttgtatcaaattcttccagaaccaaaagctgacgaggcttagtttgttctggtgttgaaaaagtttaatggatttaatcatcataaaaaacgaggaacaaactctgatggcagagctggtgttcctcgtttttttattgtggattggatttccaaagaggcattccttcattagttgactacatttttaaaaaggcaatgcttattatcgtggcggaaggccaagggcgatgcgcccgtatcggctgattcgtgtaattttccaagcgggtgaccaagtcacttcaaccttgacatcttcgatcccctcaatttcttttaggcgagcgacgatttcaatcggaaggctctcagcacagctacaagccgtatcggtgaaggtcatgaccaccttgcaagtaccggcttcatctagatggatctcgtagatcagtcctaggttatagacatctaactcaacatcggtatcaaatacaagctccaatttttcgattaacgacttctctagtgcgagggcgcggtcattgattttgatatcctctctcatcgcaagatcctttcagtgtagtatggcttccattttctcataattcggctgataaggcaagaagagaacgatgatttaaacgtgtgggacaaaggaaatgcggtccagcctccatttctcttcgaatttgtggtaaaatagaggcaaaagtaagacaaaggatgaaggctatgaaattacaaaaaccaaaagggacccaggatatccttcctggcgattcagcgaaatggcaatatgtagaaggctttgcacgcaaggtctttgcgcgatacaattatgatgaaatccgcacaccgatcttcgaacattatgaagtcatcagccgttcagtaggggatacgacggatatcgttaccaaagaaatgtatgacttctatgacaagggagaccgtcatatcacgcttcgtccagaaggaacagctcctgttgtccgctcgtatgtagaaaataaactctttgcgcctgaggtacaaaaaccaagtaagttctattacataggcccaatgttccgctacgagcgtcctcaagcaggtcgtttgcgtcaattccaccaaattggggtagaatgctttggatcaagcaatcctgcaacggatgtcgaaaccattgccatggcagcgcaattcctgaaagaattagggattgacaatgtgaccttgcacttgaacaccttgggaagccctgccagtcgtcaggcttatcgtcaagccttgattgattatctcttgccaatgaaggatcaattgtctaaggatagtcaacgtcgtttagaagaaaatccgcttcgtgtcttggattcaaaagaaaaagaagacaaggtggcggttgaacaggctccttccatcctagactatctagatgaagaaagccaagcgcattttgatgcggttcgtcggatgttggaagacttgggggtagcctatgtcatcgataccaatatggtgcgtggcttggattactacaaccacacgatttttgagtttattacagaaattgaaggcaatgaattaactgtctgtgcgggtggtcgctatgatggtttggtggaatacttcggtggccctgcgacagctggttttggatttggtatcggtgtggaacggatccttctcgttcttgaaaagaaaggcattgaattaccgatcgaaaaaggattagatgcttatattgccgttctaggagatgaggccaatgaagcagcgcttagcttggttcaagctcttcgagtccaaggtttcaaggcagaacgtgactatcttggacgtaagcttaaggcacaatttaagtcagcagatgtctttgcggccaaaaccttgattaccttaggaagcagtgaggttgaaagtggtcaagtcactgtgaaaaacaaccaaactcgtcaagaagtaacggtagctcttgaaagcttgaagaaagacttcccatctgttttagcagagttgggattggcttgatcgaacgggaaagacaaggggagacaagatttatctgggagtaggggcaaaatggttgctcctgctctcttttattttgattctgtttgccgacctttgccaagatttggcgaaaagccgttaaattttctgacatttatgatataatgagaagactactagtaaaggaatgaaacagtcatgacattagtttaccaatcaacacgagacgaaaaaaatactgtaacagctagtcaagccatccttcaaggtttggcaacagatggcggcttgtttactccggtctattatcctcaagtggagctagattttaacaccctcaaagacgcttcttaccaagaagtggctaagcttgtcttatcagcctttttggatgactttacggcagaagaattggactactgtatttctcatgcctatgacagcaagtttgatacgccagccattgctccgcttgtcaaactagatggccaatacaacttggaacttttccacggttcaaccatagcctttaaagatatggctttgtcgatcttgccttacttcatgacaacagcagctaaaaagcacggtttggaaaataaaatcgtcatcttgacagcgacatccggggacactggtaaagctgccatggcaggttttgccgatgttccaggtactgaaattatcgtcttttatccaaaagacggtgtcagcaaggtgcaagaattgcaaatgaccactcaaactggggacaatacccatgtcatcgcgatcgatggaaactttgacgatgcccaaaccaatgtcaaacatatgttcaacgatgttgaactacgtgaaaaattggcagccaacaagatgcaattctcatcagccaactccatgaatatcggccgtttggtgccccaaattgtttattacgtatacgcctacgcgcaattggtgaagacaggtcaaatcacagctggagaaaaagtcaacttcaccgttccaacagggaactttggaaatatcttggcagctttctatgccaaacaaatcggtcttccagttgggaaattgatctgtgcctcaaacgagaacaatgtcttgacagacttctttacaacacgtgtctatgataagaaacgcagcttcaaagtaaccactagtccatcgatggatatcttggtctcttcaaacttggaacgcttgatcttccacttggtaggcaatgatgccacaaagaccaaagagttgatggaaagcctcgttgcaacaggtcaataccaattgtccgactttgatgcagatatcttagatttgtttgcggctgcatacgcagatgaagcagaaactgctgcagagatcaagcgggtctatgaagcgtctgattacatcgaagatcctcatacagctgtagcatcagccgtttatcaaaaataccgggcccaaacaggggatgctgctaaaacagtcattgcctctacagcaagtccttataaattcccagttgtggcagtagaagcggtgacgggcgagacaggtctaggcgatttcgaagccttggccaaattgcacaccctctcaggtgttcctgtgccaccggctgtagacggtcttgaaactgcgccggttcgccatcgtacaagcgtagctgctaaagacatgcaagcagccgtagaagagtacttgggactgtaattctccctattagaaagatcaaaagagccgtttggctcttttatatactcatgaattcatacaaaaaaatcttaaacattgcccttcctgccatgggtgaaaatttcttacaaatgctgatgggcatggtggactcttatttagtggctcacctgggcttggttgccatttcaggtgtttccgtcgcaggaaacatcatcaccatctatcaagccatctttttggcactgggtgcagcagttgccagtgtcatgtctaaaagcttgggtgaaaaaaatcaagaccacattgcctaccatgcgacagagtccctaaaggtgaccttgttggtgagtgctctcttaggaggggcttcgctgttgtttggacgccagatgatttcgctgttgggaacggaagctgcagtcgccgaaagtggggggatttacctttccttggtcggcgggaccattgttctcttaggattgatgacgaccttgggctccttggttcgggtggccaacaatccacgtattcccatgtatgtcagcttgttgaccaatgttttgaatgctttattctcctctgtggctattttcctttttggttggggcattgtcggagcagctttggggactgtgctagcccgtctggttggggtcatcctcttgtggcaaaaagtccagttaccctttgccccccttcgttggggattggatcgtaagctcttgaacttagcgcttccagctgccggagaacggctgatgatgcgagctggagatgtggtgatcattgcgatcgtggttgcttttgggactgaggcagtcgccggaaatgccatcggagagaccttgacccagtttaactacatgccggtgtttggagtggccacagcgacggtcatgctcgtagcacgaagcctcggtgaaggggattttgagcagattgaccgccttcgaaagcagtcttactggctgtcctttgtattgatgttgcccattgctctgggtatctttttcgggggcacccttctgacccatctctacacacaagatgcgaaagcggtagaagctagcctatcggttgtcctcttttctttgttaggaacaccctttacagcaggaacagtcatctatactgctgtttggcaaggcttaggaaatgggaaacttccattttatgcaacgaccattggcatgtgggtcattcgaattggagccggttatctgcttggagtaacccttggcttgggtcttccaggggtctggacggggacgctgctggataatggctttcgctggctatttttgagtcagctttatagacgaaaagtaggagagagaaaatgacaaaacgagcttttatttgggatttggatgggaccttgctggattcctatgatgctattctggcgggtcttgaggagacttatgcatcttatcagcttccgtttgaccgagcgagtattaaagactatatcttgaagcattcggttcaagatcttttagtagcggtggcagcagagtatcaactggatgtgacggacttaaatcatcgccgagcagaaagtctagcagagaaaaatgcccaggtccttctgatggagggggcgcgtgatgtcctgtcctgggcgaaggatgctggtatagaacaatttgtctatacccataagggagagaatgccttggtcatcctacgggacttgggtttggagtctttttttaaagagattttgaccagtcaaagtggttttgcacgcaagcctaacccagaagcagccatttatctgatgaagaagtacgggttgcatccggaaaagatctactatattggggatcggagcctggatattgactttgcaagaaatagccagattcagagtatcaatttcttgacgtctgactatgaaggtaattatcagatggaaagtttactagatattccagctattttaaacgctgaaaagaatctgtaaagagattgttttcattttgaaataaagtcgtaagctttctttaagaaatgtccgctataatagaaccataaacaaagacctcctaactttgtttagaaaaatcctaaaacttttctttttcataataatctccctaagagtcgcccaatcaggcggctttttttgtgcgaaaaaacagtgccagctttttttcttgcccggatggaagaaaaagtttatgattgactaatcaattattgatgcatcaaaaataatttggagaaggaatatggcagaaataaatgatttgctctaccaactacgcttggcagatcaatcaactacacagttatttgaaaagcgcctagggattagcttaacgcgttaccaaatcttgcaggatttgttagaacaagcgccttgcaatcagatcgcggttcaggagcgcttgcagattgatccagcggctttaacccgacatttcaaaatattagaaaaggaaggatttgtccatcggagtcgaaatccaaaaaaccagcgggaaattgtaatccatctgacagatactgcctataatcggttggtcaaacatccccctcgctatcatgtggcggtgaaagaacagatgagtcggattttgactgctcaagaacaagagcaattttcttacctgctggacaaattagtatctggcattgaacaaataacagttgaataaaaaggagaatctacgatgtcattactgacgattattttagcaagtcttgctgcactggagcatttatatattttttatttggagagcatcagaaccacatctgataccacaagtcgggttttcaacatggataaagaagaactcgctcgcccatctgtgacctctttatttaagaatcaagggatatacaatgccttgattggtgccttcctcttgtatggattgtttgtctctaataatagtgaagttgttacgatttttgtgctctttattattggggctgctacctacggtgcgatgacagccaataaaaagattatcttgacccaaggtggccctgctattttggccttgttaagtatcctatttttgggttaaaaaagatgcgccgatagggaactttgagttgattgtattaaataagtgtagaaaaaagtataaaaaaagactaaaaattttattgactttcgaagaaaaagggttataatggtagcaacagaaaagtaatgagtcagctattttcagggagcttgtgggaattgtgaacaagcaatagcgactgatgaaaattggactgttatgatcaatgaattctaacccatgtgaattcggttggcaccccttaccgtgcaactccttgatagaggagatagagatgtagggaaagaccagctatttttccctataaaagaggtggcaccgcggacattacgccctcacacagtttttgtgtgagggcttttctatgtgccttagcaagcgaagcgagcttaggcacattgatcccaaagcggaaatagagcgtgggataaccgtgatcgccttagcaagccaaggtgcggctgaattccttagaataaaagagttctaaaagagaggtttctgatatgaaaaaagttttatctgctgatgtgttgagtccaattttggcttatatgcgtttggatgcgccccataaaatgatcttggagtcgatccctcgtgaaaaagagaatgcgcgtttttcaattgtagcttatcggccggtcagtgaagtcaagtttgaaaatggtgtcctctattacaatgatcaaattatcgaagaggatcctttggactttttgaaccgcatcacggtcaaaacgaaaacttcagaagagcttccttttaacggtggggcgattggatttgtcggctatgacttgattggtctctatgagaacattggttccattccggaagatacgatcggcacaccagatcttcactttttcttatatgaaagctatgtgatttttgatcacaaaaaggaaaaggtctatgtggtggaagagaaccactatagtgggcgaagtgaagcagagcaagcgtcgagcttggagcaagtattagcacaattggcaagacctgcaaaagaagagtttcaggacaaggacctgcatgcgcttcatttccacaatcatttggagcaaaaagagtttgaggaaatggtggccctagcgcgggactatattcgaaaaggagatatgttccaatgcgtgctcagtcaacgtttttcagctgatttttcgggtaaaccattggattattaccgcaatttgcgcgtgaccaacccttcgaattatctctacttttatgattttggggagtaccaaattatcggtgctagtccagaaagtctggtgtcggtcaaggaccgagtggtgacaactaatcccattgcgggcacgcgtccaagagggatcgatgaagaggctgatcggaaattggcagctgagttgacaggggatccaaaagaagtcgcagagcaccggatgttggtggatctagggcgaaacgatattggtcgtattgctcaaaatggttcagttgaagtgaccaaatatatggaagtggaattcttccgttatgtgatgcacttgacgagtgtggtcaagggtcaattacttcctggactagcctctattgaggctctgaaggcaactcttccagctggaaccgtttcgggtgctcccaagattcgagccatgaagcggatctatgaggcagaaaaagagaaacgcggggtctatgcgggtgctattggctatctctctgtgacgggggatctcgattttgctattgcgattcgaaccatgatcctcaaaaataagaaggcttatgtgcaggctggagcaggaattgtttatgattcgatcgctgaaaatgaataccaagaaaccgtcaataaggcaaaatcaatgactaggattggagaagaaggatgattttattagtcgataattacgattcatttacctacaatttagcacagtatatcggaaaatttgatgaggtccaggtgcttcgaaatgatgatacggatttgtaccaggttgcccaagaagcagatgccttggtcttttctccaggtccaggttggccaaaggatgcgggcaagatggaggagatgatccgagatttcgcaggggtcaaaccaatcttggggatttgcctgggacatcaagcgattgcggaagtttttggagggcgcttgggattggcaccacaggtcatgcatggcaaacaaagccagatccagctagaagctccctctccgctatacgcgggtgtcgcaaaagaggtcccagtcatgcgttaccattcgttgacgattgaagacatgccagaggattttgtcattacctctcggacgacggatgaccaagcgattatggggattcaacatcgtagcttaccgatttatggttttcaataccatccagaaagtatcggaacgccagatgggctcaagaccatcgaaaattttgtcaaactagtcaaggagcggaagatgaaacaagtgcttgcaaaagtagcagaaggaatggatctaaccagtgcagagttagaagcggccatggaggaagtcgttgctggtcgtgcttcagaagcacaggtgacggcccttcttctaggtcttaaaatgaagggagaaacggttgaagagcggacggctattgcaaaagtgatgcaggcctatgcagtcgctattcctacggaagttcaaggagcaatggacaattgtggaacggggggcgatcgttcgtatagtttcaatatttcaacaacagctgccttcgtccttgctggtggtgggattaagatggcgaaacacggaaatcgttcaatctcttccaaatctggttctgcggatgtattagaagctctagggattaaccttgatttgggtccagaagacttgggacgagtgtttgaaaaggcgggaattgtcttcctatttgccaaaaatctgcatcctggcatgcgctatattatgcctgctcgcttggcgctaggggttccaacggtgatgaacttaactggtcctctaatcaatccgattcctctagaaacccagctattgggaaccagtcgtccggacatgctagaaagtacggcagagattctaaaaaatttgggtcggaaacgcgcagtagtggtgagtggtccacaaggtttggacgaggcaggccttgatggagaaacccagctcgctattctggaaaatggacaggttaccttatccagctttcaaccagaagatatcggaatggagcgcattgaaattgatcaagtacgaggtggagacgccaaacgcaatgcggaaattttgctcagcgtcttggagaatgaagcaagtcccttcttagaggtgactgtcttgaatgctggccttggtttttatgccaacggcaaggtagattctatcaaggaggggattgccttggcacgtgaagtgattgccagtggggctgcccttgagaaattgagattattacaggagtatcaaaaatgagtcaagaattcttaccaaagattctaaaggaaaaggcgcgtgaagtggctgcgatgaaagaagaggaactccaacctttgcgcgagacttaccgcctgtatgattacctaaagagtcatccagaaaagcttcaggtcattgcggaagtgaaaaaggctagcccgagtctgggagatattcatgtcgatgtggatatcgtcgctcaggctaagacttacgaagaaaatggggcagttatgatttctgtcttgaccgatgaagtgtttttcaagggcagtatcgagtatctccgcgaaatatctagtcaggtgtacattcccaccctcaataaagatttcattgtggatgaaaagcaaataattcgggcgcgaaatgcaggggcaaccgtgatcttgttgatagttgcagccttatcagaggctcgtctgaaagaactcttcgattttgcgacccatcttggcctggaggtcttggtggagacccataatctgacagaactagaggtcgctcaccagattggggctcagatcatcgggatcaataatcgcaacttggtgacctttgagactgatcttcatactagccttgaattggcgaccaattttgaacaagaaccggtttacatctcggagtctgctatttttacagcagcagacgctcgcatgctggctccttattttagtggcattctcgttgggacagccctcatgaaggcagacaatgtggctgaaaaagtaaaggagttgcagattgacaaagattaaaatttgcggattgtccactccggaagccgtccagaccgctgttgaggccggtgcagattacattggttttgtctttgcaccaagcaaacgtcaagtcacgctggagcaagcccggcagttggctacaggcattccaaagggggttcaaaaagtcggtgtttttgtatcaccacaaagagaagaagtggagcaagcttgccaagttgtgggcttggatctgatacaagtgcatggaccgatggatgaaaccatcttgcaagaccttccccaacaaacgattcgcgctgttcaagtggggaaagatacagctcttcctgggaccagtgccgattatctgctctttgatgctcctgtagcaggaagtgggcagacttttgactggcaaaagctcgaaacccaaaacttcacaaagcccttctttattgcaggaggcttgacggaagacaatgtagcagatgccattcgcttctttcatccttatgcggtggatgtatccagtggggtcgagacaaatggaataaaagatcaagaaaagataaaacgatttatagaaagggtcaagcatggcatataaacaaccagataaaaacggattttacgggcggttcgggggacgatttgtccctgaaaccttgatgacagcagttttagaattagaagaagcctacagagaaagtcaagcagatccttcttttcaagcagaattggatcagcttctgaaacaatatgtcggtcgggaaacaccgctctattacgctaagaatctaaccaagtatgtcggtggagccaagatctttcttaaaagagaagacctcaaccacacaggggctcataaaattaataatgccctaggacaggttttattggcacaccgaatgggtaaaaagaagatcatcgcagaaacaggagccggacagcacggtgttgcaacggcaacagccgctgctttatttgatatggaatgtaccatctacatgggggaagaagatgtcaaacgccaagcccttaatgtctttcggatggagttgttgggggcaaaggttcaatcggtaacagatggatcgcgtgttctcaaggatgcagtcaatgctgcccttagagcctgggtagcaaatgtggaggatacccactatatcatgggttctgctctaggacctcatccattcccagaaattgtccgtgattttcaaagtgtcatcggtcgagaagccaaacgtcaatttgcagagcaaaatgacggggcgctgccagatgccgtcctagcctgtgtaggaggcggatcgaacgctattggcctcttttatccttttgtagaggatacaactgttgctatgtacggggcagaagcggctggccttggggtagatacagaccagcatgcagcaaccttgaccaagggacgtccgggagtccttcacggagccttgatggatgtgttacaggatgtgcatggacagattttagaagccttctcgatttcagcaggtctcgattatccagggattgggccagagcattcttatttccatgaaatcaagcgggcaacctatgtgcctgtgacagaccaagaagccctagaagcttttcaattgctttcaaaagtggaaggaatcattccagccctggaatcgagccatgctatcgcctatgcggtgaaattggccaaggagatgggacctgaaaaatccatgatcgtttgcttatcaggtcgtggggacaaagatgtggtacaagtcaaagaccgcctagaacaagagagaggggagtaagatgggaaagaccttaacagagcatttacaagagctgaaagaccagcagcaagggatctttgttccgtatatcatggcaggagatcatgaaaaaggcttagcaggtttgcaggaaaccatccaatttttggaggagcttggtgtctcagccattgaagttggtattcctttttcagatccagtggcagatggccctgtgattgaagaggcaggactacgaagtttaggccatgggacgacgacagagggtctggtgcaaacgatccagtgtctggagacaactgttcctttggtcatcatgacctatttcaatcccttgttccaatatgggctcgaaaacttctttagagatctagaaggaacagctgttaaaggggtgattattccagatcttcctcatgagcatgcggatctggtagagcctctgttagcggataaagacatcgctttggtgccactagtgagcttaaccacaggaatcgagcgccagaagaaattgatccaagatgcagaaggttttatctatgctgtagcggttaatggagtgacggggaaagctggtagctatcgagaagatctggaccaccacttggcccaattacacgaaatagcttcgatccctgttttaacaggttttggagtttccagcatggaggatgttcaccgtttcaacaaagtctcagatggggttattgtggggtccaaaatcgttaaggctctccaccaaggagagacagacgctatcgcttgttttatttctcaagcagtgaagggctagaaggttcattccattcatcatcagcttgattctcctagataaagctctttgtctactattttaaacattcccctcgtttgtctttacaaacgagggtttctcgttacaatagagatagtaacaagaaaagaggagaagagcatgataagccttgaagagattgatcaagtcatccagttaggtccttttgaaccaacctgggcctctcttagccatcaagtctgtccagattggtattgggatgccaaatttggaatatttatccactggggcgtctatagtgtacctgccttcggttcggaatggtattcgcgaaatatgtatatccaagggaatccttgctatgactatcatcgagcgcattttggagaccaggctagctttggctacaaggatctcattcctctatttacagccgatcgctttgatccggcatcttggctagatctctttcaaaaagcgggagcccagtatctttttccagttgcggagcaccacgatggttttcagatgtatgcctctactctctcgccttataatagcttagaaatggggccgagacgagatgtcttaggagagctgagggaggaagcagaaaaacgtggcctgcacttctgtacgtcctctcaccgggcagaacaccagtttttcttttcacatggcaaggaattcactagtgacattccgcaagaagtcccaagagacagcctttattggccagccgagccagagcccaaggatcattttgatctgacttccaagccttatccaagtaaagaattcttggaagattggctgttgcgaacctgtgaactggtgcgggactaccagccagagctcctttattttgactggtggatccagcatgagagtttccgtccctacttgatgcgctttttggcttattattacaatctagcagcacaagaggatcgaaaggtggctgtttgttacaaacaggatgccctccctttcggttcaggaatcgttgagatggagcggggaggatacggagagacgcaagcctttccgtggcaaatggataccgcgatcgcccgtaactcttggtgctatacccaggatctagcctacaagaccagtaaggaattactacaaaatttagtcgatgttgtggccaaaaatggcaatcttctgctcaatattggacccaaggcagatggcacgatccctgagcaagaccaagacatcctcacagagctcggggactggctggcggtaaatggagaagccatttatcagagtcggccttggcgggtgtcatcggaaggaccgaccgaggcccaggaaggttccttctcagatggagaagcaccactctataccagccaagatttccgctataccatgcgtgatggctttctttatgccatccagctggaaccaagtggaaggacggaagagttgaccttgccgtctctcgcctatgacctcaagcaaccgagaattcttcatgcgcgcattcaaaagctagagctccttggagaaagtcagctcctttcttggagccgagatgagacagggctccatcttcagttaccagcttgtaggaaaaaacaaccgcgtgttttgcgcctcagcttttagttttcttgaagctttctataaggaatcgtttaggtttctcttgtatactgtactcatccaataagaaatgaggtacagaaaatgaaaatctcagttaattatccaaaacgctttaagaaattgccacaacaaggttcttgttacggcgaataaacacttctcttcatttttcataagaaactcctaaagaaggctctacccgaaagggtagagtttttatgtaccagagaccttgtgattcgtggtataataagcctatggaaaaaaagaataaattactactcatcgacgggtcttccgtcgcttttcgtgcctttttcgcactttacaatcaaattgatcgcttcaaaaatgccaatggtctgcataccaatgcggtctatggctttaacctcatgttgagccatctattggagcgcatccaaccgacccatgtcctcgttgcttttgatgcaggaaagacgacttttcggacggagatgtatgccgactacaaagggggccgtgcaaaaactccagatgagttccgtgagcagtttcctttcattcgtgagcaattagatcatttgggaatccgtcattatgagctggcccagtatgaagcggatgatcttattggaacgctagataagatggcagaaactagctcggtgccctttgatgtgaccattgtctctggggacaaggatttgatccagctgacagatgacaatacggtggtggaaatctccaaaaaaggggtagcagagtttgaagaattcactccagcctatctcaaagaaaagatgggactgacacccgagcagtttatcgacctcaaggccttaatgggagataaatcggataatatcccaggtgtgactaagatcggagaaaagacagggatcaaactactcctagagtacggctctcttgatggcatttacgagcatatcgacgagatgaaggcttctaagatgaaggaaaacctcatcaacgacaaggagcaggcctacctatccaagactcttgcgaccatcgataccaatgcgcctattgaaattggcctagacgatatcacctatacgggccctcatctagaaaatctcgccaagttttatgaggagatgggcttcaagcaactccgtcaggccttggatctcagtggagaagaagcggctcctgtagccattgactatacagaagtcgagcaggtcacttcagatatgctcacggaagatagtttcttccattttgagatttttggggacaattaccatacggaacccatcatcggtttcgcatgggggaccaaaggtcagctctacgcgagtacagatactggtcttttacaaacaccgattttcaaagaatttctcgaaaaaacgcccctcaaggtctatgacttcaaacgggccaaggtcttgctcagccacttgggcattccccttcaaaatcccgcgtttgacagtcgattggctaagtatctcttgtcgaccgtagaggacaatgaaatttcaaccattgcgagtctctatagtcagattgcgctgccgctggacgaagtcgtttatggcaagggagccaaaaaagctatcccagaaaaggcggtcctattagaacatttggcacggaaagtcgctgttctactggataccgaagagcctatgatggagcagttgcaagcccatgaccagctggatttgctctatgatatggagcaaccactagcagctgttttggccaagatggaaatcgcggggatcaaggtagagcgccagaccctagaagacatgcaggtggaaaacgaagtggttttggagcgcttgacccaagaaatctacgagcttgcaggagaagagttcaacatcaattctccaaaacaattgggcgtcatcctctttgaaaaattggaactccctcttgaatatactaagaaaaccaaaaccggctattcaacagccgttgatgtcttggaacgcctggctcctatcgcaccgatcgtgtctaagattcttgaataccgccaaattgctaagatccagtcgacctatgtcatcggtcttcaagattggattttgaaagatgggaagatccatacccgctatgtacaggatttgacgcagacaggccgtttgtccagtgtggatcccaacctgcaaaacattcctgtccgtttggaacaaggtcgtctcattcgtaaagcctttgtcccagaagaggaaaacagtgtcttgctgagttcggactattcacaaatcgaactgcgtgtcttggcccatatttcgggagatgagcatttgatagatgcctttaagcatggggcagatatccatacatcgactgctatgcgcgtcttcaatattgcaaaaccagaagacgtgacgccgaatgaccgtcgcaatgcaaaagcagtaaacttcggtgtggtttatggaatttccgactttggactgtctaacaacttagggatcagtcgaaaagaagccaaggcctacattgagacctacttcgaacgctaccctggcatcaaggactatatggagagagtggtgcgggaagcgcgtgacaaaggctatgtagaaaccctcttcaagcgtcgtcgggagattccagatatcaattctcgcaacttcaatgttcgaggctttgcggagcggacagctatcaactcaccaatccaaggatctgcagcagacatcttgaaaattgccatgatccacttggaccaagcgctagaaagaggagcatacaagaccaagatgcttcttcaagtgcacgatgaaatcgttctgcaagtaccaagtgatgaactgacggcgatcaaagaactcgtcaaagagaccatggaatccgctatcgaacttgcagtaccactggaagccgatgaaaacgaaggcaagacatggtatgaagccaaataagattgagtttgtccaaaacagaaagcggtaggagacttttcagttccctaccgcttttaacgacaaacacttgcaatgccttccgtattgttatactatttaaagaaaggaaacgcatacaaaaggagattcttatggcttattcatttcgcaatcctagtgatggcattatcaaacattacctagaaaccagcaagatcatcgctgtagttggattatctgatcgtgaagacacaaccagtcatcgtgtcagtaaggagatgcaagagcggggctatcggattattcctgttaatcctcgtgcagccggtggccagattcttggagaaacggtgtatgctagcttgcaggagattcctttcccagtagatatcgtcgatgtataccgacgcggtgagtttttaccagatgtggcacgtgattttattgagacggatgcgaaaattttctgggcacaattggagctggaaaatcaagaagcagaagaaatccttcgtggagctggacgagaagatatcgtcatgaaccgctgtatcaaacgggaacacacccgactgatcttaggagactccctatacggtttataaatgataaacaattgatcatagaagaaaaccccagcttgctggggttttcttcttactcttattcagtttcatggcttgaatggcctgtaaaatggcgcggcccttgtttgatctgcttgatttgatcataaaaggcaatttggcagttgataaagtaaggcatggtataaaagccgatgacatcgcgcgtgaagtaattcaagaagtaccaaccaatcaaggttagatcgagtaccaagcgattgctgcggaaccctttcatggtttcacgactttggcgaaggactccaaaggctcccttgtagtcgccgtctcgtaattgctcatagaggatcaattcgaccaagctgagactgtagtattgtggcaggtaaaagaggaggccaatcaggccaagtatgacaccagcagtcatcagaggcatttgttgcatgagagattggaattcaggactggaagcactcagagtgctagggttgctcaccttatcgtagatcgctaaaaatcgaatgctggcgtaggtgctgatgagactccccacatagaggatgagtccccataaaaagaggacggcttgcttcaagatcaaggtggcaaatacagaggtaaagcgatcttgtttaaagatatctaagacacgtgttcgatgttcgatcttgggattaatcgtatctaaatagctaaaagtcgcaccaaccactaaaatggagatgacaaaggagacgacagaaggaaagagttgccgctggatcatgtagatacttgcttgctgcaaggtcatatccggtagtagatcgaccagatcttgcccgcttaagagaaagttagcaagaatggtcaacaggaccggaagagcaaaaaggatagctaagcccggttgctggacttgcatggtacgtgcccggaggcgaatcagtttaaggttcatagatgacactctcttcatagtagtactttttattataacataagtccgtgacagagccggtaaaatttggtacaatcgtacaggtgctcacaggaaaactgtgacaggaataagaaggctgggactgtttttcccagtacggaggtaaccatgacagattcaccgattcaatatcgattaatcaaaaaagaaaagcatacaggtgctcgtctgggagaaattatcacccctcacgggaccttcccaaccccaatgtttatgcctgtagggactcaggcaaccgttaagacccaatcgccagaagaactcaaggaaatgggttccggcattatcttggccaacacctaccatctctggcttcgtcccggggacgacttggtcgcaaaagcaggaggactgcaccagttcatgaactgggaccagccgattttgacagatagtggaggcttccaagtctattcattagcggatacccgcaacatcaccgaagaaggggtaacctttaaaaaccacctcaacggctcgaagatgttcctatctccagaaaaggccatctccatccaaaacaatctaggaagcgacatcatgatgtcctttgatgaatgccctcagttctatcagccctatgattatgtgaaaaaatcaatcgaacggaccagtcgttgggcagaacgtggcctaaaggctcaccgtcgccctcatgatcaaggtcttttcgggattgtccaaggggctggatttgaagacttgcgccgtcagtctgctcaagatttagtcagcatggacttcccaggctattccatcggtggcttagctgttggggaaagccatgaagagatgaatgccgtgcttgatttcactactccgctcttaccagaaaacaagccacgctatctcatgggagtaggagctccagacagtctgattgatggcgttattcgtggagtggacatgtttgactgtgtcttgccgacgcggattgcgcgaaatggtacctgtatgactagccaaggtcgcctagtagtgaaaaatgcgcaatttgcagaagactttacaccgctggatcccgaatgtgattgctacacttgtaagaattacacccgagcttatcttcgccacctcctcaaggcagatgagaccttcggcattcgcttgaccagctaccacaacttgtatttcttgatcagcctcatgaagcaggtccgtcaagccatcatggatgacaatctcttagaattccgtgagcatttcgtcgaaaaatatggctataacaagtcaggacggaatttctagaaatagataaataggaagaaaaaagactacagccatctgagaataatagaaataactgctagacgcagtggttgattggtatctttgttcgcttgttaagctccaaagataacctaatcaactgtgcgggggcgagacgacgaacaaattggatataaatttgttctgtctcgctccctttttcctatataatagcaacttttttagcacgctttttctttcgaaaacactttcatcaaaaaaacgaaaaaaatcttctcaaatcccttgcattgggcctttgtttgtgttaaactactatggtgctgtgaaaaacagctattagctttgatgcaagaggttgcgacacgctcggttgcattgccacgcaacgcgcgtcggttttcttgtggagctagcctattatcttaaatagacgaaaaggagaaaaagatggcaaacaaaaaaatccgcatccgtttgaaagcgtacgaacaccgtacactcgacacagcggctgcaaaaatcgtagaatcagctactcgtacaggtgcacaagttgcggggccaatcccacttccaactgaacgtagcctctacacaatcattcgtgcgactcacaaatacaaagattctcgcgaacaattcgaaatgcgtacacacaaacgtttgatcgacatcatcaacccaactcaaaaaacagttgacgctttgatgaaattggatcttccaagtggtgtaaacgtagaaatcaaactttaatctaaagcttgatctagagcataaaaaacgctcgttaaaaactttttgaataaaaaactatagaaaaggaactattttctcatgacaaaaggaatcttagggaaaaaagtgggaatgactcaaatcttcactgaagctggcgaattgatccctgtaacagttatcgaagcaactccaaacgttgttcttcaagttaaaactgttgaaacagatggttacaacgctatccaagttggtttcgatgacaaacgcgaagtattgagcaacaaacctgctaaaggacatgtagcaaaagctaacacggctcctaagcgcttcattcgtgaattcaaaaacgttgaaggcttggaagttggtgctgaaatcacagttgacactttcgaagctggagacattgttgatgtaactggtacttctaaaggtaaaggtttccaaggtgttatcaaacgccacggacaatcacgtggaccaatggctcacggttctcgttaccaccgtcgtccaggttctatgggacctgttgcacctaaccgcgtattcaaaggtaaaaaccttgcaggacgcatgggtggcgatcgtgtaacaattcaaaaccttgaagttgtacaagttgttccagaaaagaacgttatccttatcaaaggtaacgtaccaggtgctaagaaatctcttatcactatcaagtcagcagttaaagctggtaaataataaggaaaggggaatacagtcaaaatggcaaatgtaacattattcgaccaaactggtaaacaagcgggcgaagttattcttaacgatgcgatctttggtatcgaaccaaaccaagcagttgtatttgatgtgatcatcagccaacgtgctagccttcgtcaaggaactcacgcagttaaaaaccgttcagccgtttcaggtggcggacgcaaaccatggcgtcaaaaaggaactggacgtgctcgtcaaggttctatccgctctccacaatggcgtggtggtggaatcgtcttcggaccaactccacgtagctatgcgtacaaacttcctcaaaaagttcgtcgccttgcacttaaatctgtttactcagaaaaagttgctgaaaacaaatttgtagccgttgattctcttgaatttacagctccaaaaactgctgaatttgcaaaagttcttgcagctttgagcatcgattctaaagtccttgttattcttgaagaaggaaatgaattcgcagctctttcagctcgtaaccttccaaacgtgaaagttgcgactgctacaactgcaagtgttcttgacatcgcaaatagtgacaaacttcttgttactcaagcagctatctctaaaatcgaggaggttcttgcataatgaatttgtatgatgttatcaaaaaacctgttatcactgaaaagtcaatggctcaacttgaagcaggcaaatatgtattcgaagttgacactcgcgctcacaaacttttgatcaaacaagctgttgaagctgcgtttgaaggtgtaaaagttgcgaatgtgaacactgtaaacgtaaaacctaaagcaaaacgcgttggacgttacactggttttacttcaaaaactaaaaaagctatcatcacgcttgcagctgattctaaagcaatcgagttgtttgctactgaagctgaataatctaaggaggaaatatcgtgggaattcgtgtttataaaccaacaacaaacggtcgccgtaatatgacttctttggatttcgctgaaatcacaacaaacacacctgagaaaactttgcttgtttctcttaaaaacaaagcaggtcgtaacaacaacggtcgtatcactgttcgtcaccaaggtggtggacacaaacgtcattaccgtttgatcgatttcaaacgtaacaaagatggagttgaagcagtcgttaaaacgatcgaatacgatccaaaccgctcagctaacatcgcgcttgtacactacactgacggtgtgaaagcttacatcattgcccctaaaggtcttgaagtaggtcaacgcatcgtatcaggaccagaagcagatatcaaagtcggaaacgctcttccacttgctaacatcccagttggtactttgatccacaacatcgaattgaaacctggtaaaggtggagaattggtacgtgctgctggagcttctgctcaagtattgggttctgaaggtaaatatgtacttgttcgtcttcaatcaggcgaagttcgtatgattcttggaacttgccgtgctacagttggtgttgtcggaaatgaacaacatggacttgttaaccttggtaaagcgggacgtaaccgctggaaaggtgttcgccctacagttcgtggttctgtaatgaacccgaatgatcacccacacggtggtggtgaaggtaaagcaccagttggacgtaaagcgccatctactccttggggtaaacctgcgcttggtcttaaaactcgtaacaagaaagcgaaatctgacaaacttatcgttcgtcgtcgcaaccaaaaataatcataagcaactagcttacactttccgccagctcggtagcgctgcctagcagcgcaagccgctgtggtactaaattttaaaggagaaaattacaaaatgggacgtagtcttaaaaaaggacctttcgtcgatgagcatttgatgaaaaaagttgaagctcaagcaaacgacgaaaagaaaaaagtaattaaaacttggtcacgtcgttcaacgatcttcccaagtttcatcggatacactatcgcagtttatgatggacgtaaacatgtacctgtttacatccaagaagacatggtaggtcacaagcttggtgaatttgcaccaactcgtacttacaaaggtcacgcggcagacgacaagaagacacgtagaaaataaggagaacataaatggcagaaattacttcagctaaagcaatggctcgtacagtgcgtgtttcacctcgtaaatcacgtcttgttcttgacaacatccgtggtaaaagcgtagccgatgccatcgctattttgacattcacaccaaacaaagctgcagggatcatccttaaagtgttgaactcagcagtagcaaacgctgaaaacaactttggtttggaaaaagctaacttggtagtatctgaagcattcgcaaacgaaggaccaacaatgaaacgtttccgtccacgtgcgaaaggttcagcttcaccaatcaacaaacgtacagctcacatcacagtagctgttgcagaaaaataaggaggtaaactcgtgggtcaaaaagtacatccaattggtatgcgtgttggtatcatccgtgattgggatgccaaatggtatgctgaaaaagaatacgcggattaccttcatgaagatcttgcaatccgtaaattcattcaaaaagaattggctgacgcagccgtttcaactattgaaatcgaacgcgcagtaaacaaagttaacgtttctcttcacactgctaaaccaggtatggttatcggtaaaggtggagcaaacgttgatgcacttcgtgcagctcttaacaaattgactggtaaacaagtacacatcaacatcattgagatcaaacgtcctgacttggatgctcaccttgttggtgaaggaatcgctcgtcaattggaacaacgtgttgctttccgtcgtgcacaaaaacaagcaatccaacgtgctatgcgtgctggagctaaaggaatcaaaactcaagtatcaggtcgtttgaacggtgcagatattgcccgtgcagaaggatactctgaaggaactgttccactccacacacttcgcgctgatatcgattacgcttgggaagaagcagacactacttacggtaaacttggtgttaaagtatggatctaccgtggtgaagttcttccagctcgtaaagacgctaaaggaggtaaataaccaatgttagtacctaaacgtgtaaaacaccgtcgcgaattccgtggtaaaatgcgcggtgaagcaaaaggtggaaaagaagtagcattcggtgaatacggtcttcaagctacaactagccactggatcacaaatcgtcaaatcgaagctgctcgtatcgccatgactcgttacatgaaacgtggtggtaaagtttggattaagattttcccacacaaatcatacaccgctaaagctatcggggtacgtatgggatctggtaaaggggctcctgaaggttgggtagcaccagttaaacgtggtaaagtgatgttcgaaattgctggtgtatctgaagagatcgcacgcgaagcgcttcgtcttgctagccacaaattgccagtaaaaactaaatttgtgaaacgtgaagcagaataaggagaggtcatgaaacttacagaagtaaaagaatttgttaaagaacttcgtggtctttctcaagaagaactcgcgaagcgtgaaaatgaattgaagaaagaattgtttgaacttcgtttccaagcggctgctggtcaattggagcaaactggacgtttgaaagaagtgaaaaaacaaatcgctcgtatcaaaactgttcaatcagaagctaaataatagactagggaaggagaatttcaatggaacgcaataatcgtaaagttcttgttggacgcgttgtgtctgacaaaatggacaaaacaatcacagttgtagttgaaactaaacgtaaccacccagtctatggtaaacgtatcaactattctaaaaaatacaaagctcatgatgaaaacaatgttgctaaagaaggcgatatcgttcgtatcatggaaactcgtccgctttcagctacaaaacgcttccgtcttgtagaagtcgttgaagaagcggtcatcatctaatcatacctgaaaggagaaaacgtaaatgattcaaacagaaactcgtttgaaagtcgctgataacagtggcgcacgcgaaatcttgacaatcaaagttcttggtggttcaaaacgtaaattcgcgagcatcggtgatgtaatcgttgcatcagtaaaacaagctactcctggtggtgcggttaagaaaggtgacgttgtaaaagctgttatcgttcgtactaaatcaggtgctcgtcgtaaagatggttcatacatcaaattcgacgaaaatgcagcagtaatcatccgtgacgacaaaactcctcgcggaactcggatctttggcccagttgcacgtgaattgcgtgacggtggtttcatgaagatcgtgtcacttgctccagaagtactttaatcaataaaaaaacaaacacagtcccctggcatagccagggtgcccatcgggcgtaagaataaaaggagaataaaatgtttgtaaaaaaaggcgacaaagttcgcgttatcgctggtaaagacaaaggcgtagaagctgttgttcttactgctcttccaaaagtaaataaagttgttgtagaaggtgtaaacatcatcaagaaacaccaacgtccaaataacgaaaaccctcaaggtgcgatcgttgaaaaagaagctccaatccatgcttctaacgttcaagttttggacaaaaacggtgttgctggacgtgttggctacaaatttgtagacggcaaaaaagttcgctacaacaaaaaatcaggcgaagtgcttgactaatcacgaaggaaaggagaagtataatggctaatcgtttaaaagaaaaataccttaatgaagtagtaccatcattgactgaacagttcaactattcatcagttatggctgtgccaaaagttgataaaatcgttttgaacatgggtgttggtgatgcagtatcaaatgctaaaaaccttgaaaaagctgctgaagagcttgctttgatctcaggtcaaaaaccattgatcactaaggctaaaaaatcaatcgccggcttccgtcttcgtgaaggtgttgcgatcggtgcaaaagttacccttcgtggtgaacgtatgtacgaattcttggataaattggtaacagtttcacttccacgtgtacgtgacttccatggtgttccaactaaatcatttgatggacgcggaaactacacacttggtgtgaaagaacaattgatcttcccagaaatcaactttgatgatgttgataaaactcgtggtttggatatcgtaatcgtaactacagcgaacacagacgaagaatcacgtgcattgcttactggcctcggaatgccgtttgcaaaataatataggaggtaaaactaatggctaaaaaatctatgattgctaagaacaaacgcccagcgaagttctctactcaagcatacactcgctgtgaacgttgtggacgtccacactcagtttaccgcaagtttaaactttgccgtgtttgcttccgtgaattggcatacaaaggtcaaatcccaggtgtcacaaaagcatcttggtaatttaagatatcaagggcgttaaaactccaagtgaaaataggaaacttgacgaagaaactttagtttctaggaaagtttatctttttcacacagagtttagcccgggttcagttgggcttgccaatttgaacacgagctacagctttggcaaaaaagaccaattttctttggagcatcgctcctgcatcaaattgcctatttttgctctcgctgttacgctcactgtatcatgtattaactagcaagtgcaacttgcaaactactagtaagaggagaaattataatggttatgactgacccaatcgcagacttccttacacgtattcgtaacgctaaccaagcaaaacacgaagtacttgaagtacctgcatcaaacatcaaaaaagggattgctgaaatccttaaacgcgaaggttttgtaaaaaacgttgaattcatcgaagatgacaaacaaggcatcatccgtgtattcttgaaatacggacaaaacggtgaaaaagttatcacaaacttgaaacgtgtatctaaaccaggtttgcgtgtttacaaaaaacgtgaagatcttccaaaagttcttaacggacttggaattgctatcctttcaacttctgaaggtttgcttactgataaagaagcacgccaaaagaacgttggtggggaagttatcgcttacgtttggtaatatttagttcccgatttcgttgtgactcttcgttattgtctcttgcctaacccaaagttatgtctgcgagacaatgccttgattcacttagaaaatgagacctaaacattaacttttaaatcaaaaagatttaaaccccgtgaaaactggcccgcaaaggcctgacaatttaacaggagaataaaaaacatgtcacgtattggtaataaagttatcgtgttgcctgctggtgttgaaatcactaacaatgacaacgttgtaactgtaaaaggacctaaaggagaacttactcgtgagttctcaaaagatattgaaatccgtgtggaaggtactgaagtaacacttcaccgtccaaacgattcaaaagaaatgaaaacaatccacggaacaactcgtgcccttttgaacaacatggttactggtgtatcagaaggattcaagaaagaacttgaaatgcgcggggttggataccgtgcacaacttcaaggatcaaaacttgttttggctgttggtaaatcacacccagacgaagttgaagctccagaaggaattacttttgaacttccaaacccaacaacaatcgttgttagcggaatttcaaaagaagtagttggtcaaacagctgcttatgtacgtagccttcgttcacctgaaccatacaaaggtaaagggatccgttatgttggtgaatacgttcgccgcaaagaaggtaaaacaggtaaataatgtagtttggttgtttttcaaccaaccttcatcttaccaactcagtgcttagcacatgattttaaaattaagaggtgaaaattgtgatttcgaaaccagataaaaacaaaatccgtcaaaaacgccaccgtcgcgttcgcggaaaactctctggaactgctgatcgcccacgtttgaacgtattccgttctaatacaggcatctacgctcaagtaattgatgacgtagcgggtgtaacgctcgcaagcgcttcaactcttgacaaagaagtttcaaaaggaactaaaactgaacaagccgttgttgtcggcaaacttgttgctgaacgtgcagttgctaaaggtatttctgaagtggtgttcgaccgcggtggatatctatatcacggacgtgttaaagctttggctgatgcagctcgtgaaaacggattgaaattctaataggaggacactagaaaatggcatttaaagataatgcagttgaacttgaagaacgcttagttgccatcaaccgtgtaacaaaagttgttaaaggtggacgtcgtcttcgttttgcagctcttgtagttgttggtgaccgtaatggccgtgttggatttggtactggtaaagctcaagaagttccagaagcaatccgtaaggctgttgaagatgctaagaaaaacttgatcgaagttcctatggttggaacaacaattccacatgaagtaacatcagtatttggtggagctcgtgtattgttgaaaccagctatcgaaggggctggggttgctgcaggtggagcagttcgtgccgttgtcgaattggcaggtattgcagatgttacatctaaatcacttggatcaaacactccaatcaacatcgttcgtgcaactgttaacggtttggcacaattgaaacgcgctgatgaagttgctgcccttcgtggtatttcagtttctgacttggcttaagaaaggagattcaaatggctcaaattaaaattactttgactaagtctccaatcggacgcatcccgtcacaacgtaaaactgttgtagcacttggacttggcaaattgaacagctctgttattaaagaagataacccagcagtacgtggtatgatcactgctgtatctcacttagtaacagttgaagaagtaaaataatctatttgaaatagaaacaaagttttcaggggtatgagaggttctcatcccctaaaactaaatataagtataggcgagtttgtagttaggacaccttttcctgattacatgcgttagcaatttacaaaagaggagaaaattaataatgaaacttcatgaattacaacctgctacaggttcacgtaaagtccgcaaccgtgttggtcgtggtacttcatctggtaatggtaaaacttctggccgtggtcaaaaaggtcaaaaagctcgtagcggtggcggtgtacgtcttggttttgaaggtggacaaactccattgttccgtcgtcttccaaaacgtggatttacaaacatcaacgctaaagaatatgctattgtgaaccttgatcaattgaacgcctttgaagatggtgctgaagtaactccagtagtacttgtagaatcaggaattgtaaaagctgaaaaatcaggtatcaaaattcttggtaacggagaattgactaagaagttgactgttaaagcagctaaattctctaaatcagctgaagaagctatcactgctaaaggtggttcagttgaagtcatctaagtgaggtgacctatgttttttaaattattaaaagatgcatttaaggtgaaacaagtacggtcgaagattttatttacgatcttcatcattcttgttttccgcattgggaccacgattacagtgcctggtgtaaatgcgaaaattctgaacaaccttcaagatgtgtccttcttgaacatgctcagtttggtttctgggaatgccatgaggaacttctcagttttcgcattaggggttagcccatacatcacagcttcgatcgtcgtgcaacttttgcaaatggatctgttacctaagtttgttgaatggggcaaacaaggagaagttggtcgaagaaagctcaaccaagcaacacgctatatttctttggttctagcctttgttcaatccatcgggattacagctaccttccacaccttgtctcaggcgaaattagtcgcaactccaaataccaagacctatctgttaatcggtgcgattctgacgaccggttccatgattgtgacttggcttggagaacaaatcacagataaagggtacggtaatggtgtttcaatgattatctttgcagggattgtgtcatcaattcctgagatgattaaagaaatctatgaaaatgcatttgtgaacgttcgttctggtcaaatgaccaattccctcatttttgttggggtattaatccttgccgtcttggttattgtttactttacaacctttgtagagcaagcacaatacaagattccaatccaatatacaaagattgcacaaggagctccatcaagttcttaccttcctttgaaagtaaacccagcaggagttattcccgtcatcttcgctagttcgattacagcagcgcctgctgcaattttccaagtgattagcgctatgggttacaatgcaggatgggtgaaaacagctcaggccatgttggctacaaatacaccaactggtgtggcaatgtatgccttattgatcattctcttcaccttcttctacacgtttgttcagatcaatcctgaaaaaacggcagaaaaccttcaaaagagtggtgcctatatcccaggcgttcgccctggtaaaggaacagaagagtttatgtctcgtttgctacgtcgtttagcaagcgtcggatcagtattccttggctttattaccatcattccaatcctggctcgagatttatttggtttgacagatgcagttgctcttggaggaactagtttgttaatcattatttcaacaggtattgagggaatgaaacaattagaaggctacttattaaaacgtaagtatgtcggatttatggacacaacaacagaatagaataaggttgactttgtcagccttctattttgtttttaaatggaaataggaattcgctcctgcttccatttaaaaacaaaataaggagaattcatcatgaatcttttaattatggggttgcctggagcaggtaaggggacccaagcagcgaaaatcgtggaagagtttcacgtagcgcatatctctaccggcgatatgttccgcgcagcgatggctaaccaaactgaaatgggtgtattggcaaaatcattcattgacaaaggtgaattggtgcccgatgatgtgacaaacggaattgtaaaagaacgtttggctcaagacgacattaaggaaaaaggattccttttggacggttttcctcgcacgattgaacaagctcatgccttggatcaaatcttggtagaccttggtttggagcttgaaggagtgatcaatattgaagtggatccatcctgcctcctcgagcgcttaagtggtcgtatcatccatcgtgaaacaggtgaaaccttccataaagtatttaacccaccagctgactacaaggaagaagactattaccaacgtgaagatgacaaaccagaaacagtgaaacgccgtttggatgtaaatattgctcaaggtgagccaattcttgctcattaccgtgcaaaaggattggtccatgatattgaaggaaatcaagacatcaacgacgtcttcaaagatatccaaaaagtcttggagaatttgaaataaaaacgttttagtcacttgcaatatttgacaacaagtgatacaattagttagtctgacttataattgttacctctgtgctcagaggaatgaatcgaaatttatggaggtacttttgcgtggcaaaagacgatgtgattgaagtagaaggcaaagtagttgatactatgccgaatgctatgtttacggttgaacttgaaaatggacatcagattttagcaacagtttctggtaaaattcgtaaaaactatattcgtattttagcgggagatcgtgttacagtggagatgagtccgtacgatttgacacgtggacgtatcacataccgctttaaataatcgaaaaacttggagggataaaaatgaaagtaagaccatcggtcaaaccaatttgcgaatactgtaaagtaattcgtcgtaatggtcgtgttatggtaatttgcccagcaaatccaaaacacaaacaacgtcaaggataagatagaaaggagaaaacatggctcgtattgctggagttgacattccaaatgacaaacgtgtagtaatttcattgacttatgtgtacggtatcggacttccaacatctaagaaaatccttgctgctgcaggcgtttctgaagatattcgtgttcgcgatcttacaccagatcaagaagatgctatccgtcgtgaagttgacgcaatcaaagttgaaggtgaccttcgtcgtgaagtaaacttgaacatcaaacgcttgatggaaatcggttcataccgtggtatccgtcaccgtcgtggacttccagttcgtggacaaaacactaaaaacaatgctcgcactcgtaaaggtaaagctgttgcgattgcaggtaagaaaaaataaaataaaataaggaggtaaaaatcttggctaaaccaacacgtaaacgtcgtgtgaaaaagaatatcgaatctggtattgctcatattcacgccacatttaacaacacaattgttatgattactgatgtgcatggtaacgcaatcgcttggtcatctgcaggtgcacttggatttaaaggttctcgtaaatctacaccatttgctgctcaaatggcatcagaagctgctgcaaaagctgctcaagaacacggacttaaatctgttgaagtaactgttaaaggtcctggttcaggtcgtgagtctgctattcgtgcacttgctgctgctggtcttgaagtaactgcaatccgcgatgtaactcctgtaccacacaatggtgctcgtcctccaaaacgtcgccgtgtataatcatcaacaattacacagcttttcgtttaagagggagtatagcaaatgattgagtttgaaaaaccaaatataacaaaaattgatgaaaacaaagattatggcgtgtttgtcgtagaaccacttgaacgtggctatggtacaacacttggaaactcacttcgtcgtgtacttctggcttcacttccaggtgcagctgtcacttcaatcaacattgaaggtgtactccacgaatttgataccgttccaggagtccgtgaagacgttatgcaaattattcttaacgttaaaggaatcgccgttaaatcttacgtccaagacgaaaagattattgaacttgatgtagaaggacctgcagaagtaactgctggagatattcttactgatagtgacatcgaaattgtaaaccctgatcattatctatttacaatcggagaaggagcatctttgaaagcaacgcttactgtaaacagtggacgtggctatgttccagctgatcaaaacaaaaaagatgatgcaccagtgggaacacttgctgtagattcaatctatacgccagtgactaaagtcaattaccaagttgaaccagcacgcgttggtagcaacgatggctttgacaagctaacccttgaaattttgacaaatgggacaatcattccagaagatgccttaggtttgtctgctcgtattttgacagaacacctaaatctattcacaaacttaactgaaattgctattgcaacagatgttatgaaggaagtagatacaacttctgatgatcgcattttagaacgtacgatcgaagaattagatctttcagttcgttcatataactgtttgaaacgtgctggcatcaatactgtttacgatttgactgaaaaatcagaagcagaaatgatgaaagttcgtaacttaggacgtaagagtcttgaagaagttaaaatcaaacttgccgacttaggccttgggttaaaaaacgataaatagaggaggaatacatggcttaccgtaaactaggacgcactagctcacaacgtaaagcaatgcttcgcgatttgactacagatcttatcatcaatgaagcaattgtaacaactgaagcacgtgcgaaagaaatccgtaaatcagttgaaaaaatgattactttgggtaaacgtggtgatttgcatgcacgtcgtcaagctgctgcattcgtacgtaacgaagttgcatcacaaaactttgatgaagaaacaggtaaatactcagaaacaactgcacttcaaaaattgttctctgaattagcacctcgttatgctgagcgcaatggtggatatactcgtatccttaaaactgaaccacgtcgtggtgatgctgcgccaatggctatcatcgaattggtataatatcatcaattttgttgagtgttatgatgatggaatacactgttattcttagtctagctctggtctaccgctggggattttccccagcgggaacactcatcatattgaatgaatggtagacgcttgtttacgaaattgctttaatttaaaacaatttcgtaagcaggcgttttgtcttgcttttcatgagtagtcgagaatagcaaaaaatgatataatggaacccatatctccaatagaagaaaaaggattcaatgacaaaacaacaagcaattaaattactaaaagagaagtaccttagtaatatgaaagaggattcggaactctttgtcggagttgaattagagtttccgattgtagaaacaaatggaaacaaaacaaatatagaggtgacgaaaaatctttttcgaaccttagccaacttatcagattttgaagttgaaaaaatagatgacaatcaaaatcccattcaattgattcactgttcttctaaagatcgtattctattcgagttgagttacaatacaattgaatttgcatttgagagagctcattctataaatgaggtagccaaacgttttgaggcttatttgaagatcattcaaccgattttacaagaaaataatcacgaaattcaagggcacggaatccatcctttgtggaaagaaaatgataatagcccagtgaaaatcgaacgatacaagatgttaatggctttccttgcaatgaatggtacagggatgaagacacactcctatccttcgtacggagcatttatatgcggaaaccaggttcaattggatgtaaggtgcgataattatattcgcatcattaatgcatttaataaaattgaagcagcaaaagcatatttgttttctaactcagaattttcagcagaggcttggaatacaaaaattgctagagatattttctgggaagaatccttacatggttattataaggaaaatgtagggatttatcctaaggactaccaaagcgaagaagagttttttaataatctcgctagaacggctatttttacagcaactagagaggggaaatcatattattttaaaccaattcgagtggaggactatctagatcaaaaagaaattacagcctatacggctgatggaaatgagaagatcattaaccctgtaaaagaagatctaaaacaacatcgaagttaccaatttcaagatttaactgctcgtgggactgtggaatttagaagtgtttgtacacaaccattagaaaccacctttgccccgatagcctttgagttgggcttatttgtacagttagaaaaactagaagactatttagaagattcttcattcatttacaatgaagaacaggattatcgaaaacttagaaagaaatattcaaagaaaattctaagtacagaagaaaaagaagcgatacaatccttttcaaaagatctaataggcatagctaaagcaggattaattaaaagaggttacagggaagaaaaatttctcatcattaacaaagaactagactaatagaaaagtcttattgcaggcttttctttattactttaaaaaaactttcaaaaaaataaaattttttggaaaaaagtgttgacagtaagagtaggtcatgatatactaatatagttgtcgcgcgagagcgacaaagacctttgaaaactgaacaagacgaaccaatgtgcagggcgctataactaaggttatagtaactgaacaataaaaaaacaataaatctgtcagtgacagaatgagtttaagacaaacaattattttaatgagagtttgatcctggctcaggatgaacgctggcggcgtgcctaatacatgcaagtagaacgctgaagcttggtgcttgcaccgagcggatgagttgcgaacgggtgagtaacgcgtaggtaacctgcctcttagcgggggataactattggaaacgatagctaataccgcataaaagtcgatatcgcatgatattgatttgaaaggtgcaattgcatcactaagagatggacctgcgttgtattagctagttggtgaggtaacggctcaccaaggcaacgatacatagccgacctgagagggtgatcggccacactgggactgagacacggcccagactcctacgggaggcagcagtagggaatcttcggcaatgggggcaaccctgaccgagcaacgccgcgtgagtgaagaaggttttcggatcgtaaagctctgttgtaagagaagaacgagtgtgagagtggaaagttcacactgtgacggtaacttaccagaaagggacggctaactacgtgccagcagccgcggtaatacgtaggtcccgagcgttatccggatttattgggcgtaaagcgagcgcaggcggttagataagtctgaagttaaaggctgtggcttaaccatagtacgctttggaaactgtttaacttgagtgcagaaggggagagtggaattccatgtgtagcggtgaaatgcgtagatatatggaggaacaccggtggcgaaagcggctctctggtctgtaactgacgctgaggctcgaaagcgtggggagcaaacaggattagataccctggtagtccacgccgtaaacgatgagtgctaggtgttgggtcctttccgggactcagtgccgcagctaacgcattaagcactccgcctggggagtacgaccgcaaggttgaaactcaaaggaattgacgggggcccgcacaagcggtggagcatgtggtttaattcgaagcaacgcgaagaaccttaccaggtcttgacatccctctgaccgctctagagatagagttttccttcgggacagaggtgacaggtggtgcatggttgtcgtcagctcgtgtcgtgagatgttgggttaagtcccgcaacgagcgcaacccctattgttagttgccatcattcagttgggcactctagcgagactgccggtaataaaccggaggaaggtggggatgacgtcaaatcatcatgccccttatgacctgggctacacacgtgctacaatggctggtacaacgagtcgcgagtcggtgacggcaagctaatctcttaaagccagtctcagttcggattgtaggctgcaactcgcctacatgaagtcggaatcgctagtaatcgcggatcagcacgccgcggtgaatacgttcccgggccttgtacacaccgcccgtcacaccacgagagtttgtaacacccgaagtcggtgaggtaaccatttggagccagccgcctaaggtgggatagatgattggggtgaagtcgtaacaaggtagccgtatcggaaggtgcggctggatcacctcctttctaaggaaatggaaacctgtacgttggtcttgtttagttttgagaggtcttgtggggccttagctcagctgggagagcgcctgctttgcacgcaggaggtcagcggttcgatcccgctaggctccattaacactttagtagtgttaagtttgaacattgaaaattgaatatctatatcaaatagtaacaagaaaaataaaccgaaacgctgtaaatatttaaagagtttaggtcgtaagaccaaaaataaggttaagttaataagggcgcacggtggatgccttggcactagaagccgaagaaggacgtgacaaacgacgaaatgctttggggagctgtaagtaagcgacgatccagagatgtccgaatgggggaacccactagctaatggctagtactcctatctgttaaggataggtagaggaagacgcagtgaactgaaacatctaagtagctgtaggaagagaaagcaaaagcgattgcctgagtagcggcgagcgaaacggcaggagggcaaaccgaagagtttactcttcggggttgtaggactgcaatgtggacttaaagagtatagaagaatgacatgggaaggtcagccaaagagagtaagagcctcgtattcgaaatagtctttatacctagcagtatcctgagtacggcgggacacgagaaatcccgtcggaatctgggaggaccatctcccaaccctaaatactctctagtgaccgatagtgaaccagtaccgtgagggaaaggtgaaaagcaccccgggaggggagtgaaatagaacctgaaaccgtgtgcctacaacaagttcgagcccgttaatgggtgagagcgtgccttttgtagaatgaaccggcgagttacgatatgatgcgaggttaagttgaagagacggagccgtagggaaaccgagtctgaatagggcgcattagtattatgtcgtagacccgaaaccatgtgacctacccatgagcaggttgaaggtgaggtaaaactcactggaggaccgaaccagggcacgttgaaaagtgcttggatgacttgtgggtagcggagaaattccaaacgaacttggagatagctggttctctccgaaatagctttagggctagcgtcgacattgagattcttggaggtagagcactgtttgggtgaggggtccatcccggattaccaatctcagataaactccgaatgccaatgaattatggtcggcagtcagactgcgagtgctaagatccgtagtcgaaagggaaacagcccagaccaccagctaaggtcccaaaataattgttaagtggaaaaggatgtggggttgcacagacaactaggatgttagcttagaagcagctattcattcaaagagtgcgtaatagctcactagtcgagtgaccctgcgccgaaaatgtaccggggctaaaacaatttaccgaagctgtggatacctttataggtatggtaggagagcgttctatgtgtggagaaggtgtaccgtgaggagcgctggaacgcatagaagtgagaatgccggtatgagtagcgaaagacaggtgagaatcctgtccaccgtaagactaaggtttccaggggaaggctcgtccgccctgggttagtcgggacctaaggagagaccgaaaggtgtatccgatggacaacaggttgatattcctgtactagagtatgtagtgaaggagggacgcagtaggctaactaaagcgtgcgactggaagtgcacgtctaagcagtgaggtgtgaattgagttaaatgcttaattctataacattgagctgtgatggggagcgaagtttagtagcgaagttagtgacgtcacactgccaagaaaagcttctagcgtttaaacatactctacccgtaccgcaaaccgacacaggtagtcgaggcgagtagcctcaggtgagcgagagaactctcgttaaggaactcggcaaaatgaccccgtaacttcgggagaaggggtgctggctttcagtcagccgcagtgaataggcccaagcaactgtttatcaaaaacacagctctctgctaaatcgtaagatgatgtatagggggtgacgcctgcccggtgctggaaggttaagaggagtgcttagcgtaagcgaaggtatgaattgaagccccagtaaacggcggccgtaactataacggtcctaaggtagcgaaattccttgtcgggtaagttccgacccgcacgaaaggcgtaatgatttgggcactgtctcaacgagagactcggtgaaattttagtacctgtgaagatgcaggttacccgcgacaggacggaaagaccccatggagctttactgcagtttgatattgagtgtctgtgccacatgtacaggataggtaggagccattgatatcgggacgccagtttcgatggaggcgttgttgggatactacccttgtgttatggccactctaacccggtaggttcatcatctacggagacagtgtctgacgggcagtttgactggggcggtcgcctcctaaaaggtaacggaggcgcccaaaggttccctcagaatggttggaaatcattcgcagagtgtaaaggtataagggagcttgactgcgagagctacaactcgagcagggacgaaagtcgggcttagtgatccggtggttccgtatggaagggccatcgctcaacggataaaagctaccctggggataacaggcttatctcccccaagagttcacatcgacggggaggtttggcacctcgatgtcggctcgtcgcatcctggggctgtagtcggtcccaagggttgggctgttcgcccattaaagcggcacgcgagctgggttcagaacgtcgtgagacagttcggtccctatccgtcgcgggcgtaggaaatttgagaggatctgctcctagtacgagaggaccagagtggacttaccgctggtgtaccagttgtctcgccagaggcatcgctgggtagctatgtagggaagggataaacgctgaaagcatctaagtgtgaaacccacctcaagatgagatttcccatgattttatatcagtaagagccctgagagaagatcaggtagataggttaggagtggaagttgtgtgagcaatggagcggactaatactaatagctcgaggacttatccaaagagtcagaagatattgacaacgtgagtttaacttgttagaatatagatgttcaattttgaatgtttaatcattcagagttaagtgacgatagcctaggagatacacctgtacccatgccgaacacagcagttaagccctagaacgccggaagtagttgggggttgccccctgtgagataaggtagtcgcttagcaagagattgagcctagtagatactaggctcatttgggagtttagcttagttggaatcgagaggtattcgagattccaatcggcggataagagaaacgtagtttctcaccgttggctgagttaaacgaccatctgggagtttagctcagctgggagagcatctgccttacaagcagagggtcagcggttcgatcccgttaactcccattcaagcgggtgtagtttagtggtaaaactacagccttccaagctgttgtcgcgagttcgattctcgtcacccgctttgaacttttgttcaatttttaccaagttgtttaacttgggcgcgtagctcaggtggttagagcgcacgcctgataagcgtgaggtcggtggttcgagtccactcgtgcccattaatagtatggtccgttggtcaaggggttaagacaccgccttttcacggcggtaacacgggttcgaatcccgtacggactatatttttggaggattacccaagtccggctgaagggaacggtcttgaaaaccgtcaggcgtgtaaaagcgtgcgtgggttcgaatcccacatcctccttttttaaaattaacgcgggatggagcagctcggtagctcgtcgggctcataacccgaaggtcgtaggttcaaatcctgctcccgcaatttggctcggtagctcagttggtagagcaatggattgaagctccatgtgtcggcggttcgattccgtctcgcgccatcaattcaataatcaggaagggtagcgaagaggctaaacgcggcggactgtaaatccgctccttcgggttcgggggttcgaatccctccccttccatcctttacgggcatagtttaaaggtagaactaaggtctccaaaaccttcagtgtgggttcaattcctactgcccgtgttaataattatggcgggtgtggtgaagtggttaacacaccagattgtggctctggcatgcgtgggttcgatccccatcactcgcctatttattatttacattattggggtatagccaagcggtaaggcaagggactttgactccctcatgcgttggttcgaatccagctaccccagttaaatttatgccggcgtggcggaattggcagacgcgctggactcaaaatccagtgtccgcaaggacgtgccggttcgaccccggccgccggtatagtattaaagacaaggttttcggaccttgtcttttttttctttgttgtgtgtcgagttaccaattttttccattttaaaataaatcatcaagtttattagccaatgttttctgtttgctagggtacaaatgagaataagtatcaattgttgttgtaatagatgcgtgtcctaatctttctttgacaacaagataatcttctccttgatttataagtaatgatgcatgagagtgtctcaaatcatgaattcttattttctttaaatctttatccctttctagtatttgcttaaacttcttatcaatcatattttttgtaattgttattggtgtactctgtattatttgtagttcttcagtatttttcgtaaattcctcaagtttttctttttgttttactttccaatctattagcatttctgctaatttctgatttattgttatatttctagttcctgatcgtgtttttgttgtattaatgtagcttgtattattgacaaagtataccgttttggtaacgtatatcgtatttgttaaaagatttatatcattccagttcaatgcgaggatttctcccattctcattccagtaaagaaagcaattatgaaaaacaggtcataacttatttcatcatctcgaataagttctctaaatctcgtgaattcttctatactccaaaatttaatatcaggcttcctaattggtaattttctcagattcttaactggatttttgtcaatgagagattttcttataccagtatcaaaaatttttttaagtagaattagaaccttattaattgtattatagcttaaaacttcattttcattttgttttttaggttttgtttttaggtattcacgaaattcgaatatatggtcatacgttaatttatttaaatttgtatttttaaaatatggcttgatatgacgctcataattgtttctttgtgtagttgtgtagcttacttttctgccatttttcaaatcatcttcttcaagtaagtcgaataacatatccgttgtcactacaaagtcaaattgtttttcttttaattctacaactcgaatatgttgttctagttctagggcttcctttttagatttcaatccttttcgaatgatacgtattcttttttgtgtgacggggtggaaaccattagaaacatcaacggtccatttaccacttttagttttacgaatagtcattcattatgcttctttctggagttcaattcctagtagttcttcagcgacactggctggaattgtaccaatccgtttgttatcgtagatgttaaaaccacgattcactaatagtaatttgccagtatggataatctttcttgcagttcctggagcaaatccaagttcgataaggtcatcttttgttacagttttaatcatgtgatctccttttctaataagattaagtaaggggaggattaactccccttgtctaatacttatttttgttttacatctactaaatggatagcatccgccttgtaatacattgtcgaactaatcatagtagcttgtaaattgtcaaatgtaactggtacttcatccattgcttggatatagtcattatcaactaatgcttctggattgtctacagagacttgggttgatttctttttgaattgtccatccttgatcgttacattgtatttccaaccaatgattttatcggtattaaaacgtctttcgctaccatctcggtttttgataatttctccgtttgcatctgcacggacttccgtttcaaattttggaatgacttcatccaattcaaattttgttccaatgttattaaaattccagtcattttgtgagagcatttttgccatagttaatttctccttttgatattttctttgattgtagggatcaaatcctctcttttaaagagtattgccctttctattaatccacttgctaaatttggtggatattccatattgttgagtgcgagatagttagatttctcatactcatgcagtaagttattttcgtatagaaatttatacgcttttagaatagctccagaacctttataggtaaaccattctaatttttgttctagttctgtttttggttttgaaataatgatagagacaggttttgagtgacctaaaaacttttcccaagatctcaaaggttttgagaagtgactatcactatagaacctcactttttctttgagatatcccttggtaaagttgagaagatctatttctgaatgcaaccactcttgaatgaagtagtgagctttttctttcctaagttctaactcagttcttatccaattttctatataccgcttgctgataccgagcttctcagctcgttctaagcgcttatcgtaaattctaagtctttcatcatcattgggttttctcaaatataaggtctggccgattgtttcatctccgtaggtattgtagtaggtgctttttccatatataaagcgctttttctgacaaacctttagaagctgattaggagtgaaatagggtgtttcattaaaatcatctattgcaatatcaattcgtcttactgaaaattgattgtaattgtagtagaggttgttcagaaactgtctttcggacagactatttggatctaataccatatctctatagaactcgagtgcctgtcctgacatgataagcatgtaggacgactctttcgctccatagtagatacggatattcccataatgaagctggctatcatagttatagtatttaaggctccctttattctcaataaataggtcatagttaagaaatagaatatcttcaattatttctcttggcgaaaattcagtcttatcaaactgaatttgaatccagtcaaatacagaacgtaaatgttcattttttgccatagattttgattcaactttttgcctaattttgccacccttaaaatctccgaaacccttggaaatactgaattctttcgatggtacacctaacttgcagagggtggtgttactacacaccctatcggtcaaaaatggtccgtccgcatctacgctcattttcggctttctgcttcatggctcagccgaaaactcgctattagccgaacctattttttgacctcttctgaacaaaccctagtaagccggtttgcatcgactcttcaatatcttggattttctttttaagattggcattctcaatttgtatcagtcgtatttctcgcttaaattcctgttttaaggcgctcagctcatcatagagctcatctattacttggtttaggagttcttgctcattgtctgctagacttccaaatactttttgtatagcctcttttagacctatttcaagttttaggttagctaacttttgaaattgtctaaggtcttcgtctgtaaagtcataggcaactgtataacttaattgatgagttcttggatttctactgataggaattttaatttttttaaattccttgccacttatctctttaatcagttgaatccaatttttaagagtagaggtagagtttaggccagaaatttgattgactaactctttattggtcatctttttgtgaaacctccgaaattttcttgtgcaactgaggagttttctgtggtataattgttacataatatgttttgatcttggaacgaacggcacatttgtttcaagatttttttattttgtcgaatcttacctcctttattaaaatttttaaatcgactactaattacatacgcttttacctccttttatgctataatattctcaatggaatatttaatcttaaaataaatattccttatggaataattctattttataccgtttagaatattttgtcaagctgaaatatacgattaagaatatttataggagacttatgtatacagaggattataaattttcagatagattaaaaactctcagaaaatcaaaaaaattaactcaagtacaaatatcggaattaattggagttcaacaagggacatattctcgttgggagaatggaacgttagaaccaggattagaattcgttgtgaaattagcaaatatctttgggactactacagattatttgctgggacaaaaaccttattcaattatcagtagtttacctctagaacaattagatcttaccaatattgcaaacttttcaaaggatgagtttgatattttgaaacattcaatagcagtttcggtggcaagaaataaaataaaggcaacagaactaaaagatagagttgtagaaaaaaatcagttgtcagaaaaagatgcagaacttttgaataagatttttgaagaagttaaaacttattgggaacaatagaaggacgctagtcttcaaaatttcctccccaaatgtgtctaaaatattaacgaaattccatataaagaggtttatgattattttaatgcagattgatggtttatttgattaagtttcaataggtaaagattagtatattcttgttgagtgattttattttatgaaggttgtttatagttgaagggggaaagagtttgactgctatccactggtagagaacttctgatgaggctttgaacaagcccttatatgatatcaatcaccgacaacgaaaatatttggcttacagaactgcttgtgaagctctagtggatgagttcgagtaaatgttgtacttattcttgcaatttatcattaacaaaaagagagaaccgactcaaaatcgactctctctaatcaatcactctagctaatacagtcaataaatttaaaattcattttaaaaaaactaattacttctataatttattttcacatgcaaattttaactcttgaagatctttttttagtaagataggcaattcacgtctcatcattttccttaataataagatagaccagccacttaaactctcttgaactacaacctcagaagatccatttgataatttttttatataccaattatgaattgcatgagctcctattgtattacctgtccatccaaaacatgcatcggaagctgtatggatttcggatttatattttagacctcctgatttccattcaaattttgccccctcttgaatgtgagatgctaataattttatttctgaaattccattacgccagttatgccaattattgatttcagataatactgccataattttatctctttctgcatgaataattatatgttcttcagcaaaaacaagtgcattagaatcacatactacattaaagtccatcatatctagtgctacctctctatttaaattaatttcaatcaatagtcattttgatgattgacttatattatagcaattattttaaaaatagtgaagaatataattaagatagcgagattatcagatgatgctcttaggacgataagttatggagtgttaccaaaaagttactaaaatttgaaaaatgagtctattttgcaagattcaaaagtcctaaaaccctattaaatcaaggatataagatttaaaaagtgtattcatagaactcaaaatccagtgtccgcaaggacgtgccggttcgaccccggccgccggtatagattataaaaggagttttactcctttttttgtttattttttttcttttttgtgatataattaaccggtaaagtttctgctagtgaattagaaggagtttattttgtctgaagttgcaaataaaatcgatcgatttttaaattctattttattattatctgagaatcaacatgaaattttagttggttcttgtacaagtggtgtttcattaaccaacactcaggaacatattttgatgctggttgctgatgaagctctaaccaattctgtcttagcaaagaaattgaatgttagtcaggcagcgatcacgaaagctgtgaagcccttattaagtcaggggatgctggagacttatcgcgatgaaaatgatgcacgggttctctattaccgcttaactgatattggtaagccgattgccttagagcatcagcaccaccatcagcatacccttcacacttatgaggatgttttgttgaagtttactaagaatgagcaaggggtcatttctcggtttttagatttattggaagaggagttatagtttgaggtatattacggtttcaaatttatcattctattatgatcgagaaccggttctggaagggatcaattactacttagatagtggggagtttgttaccttgaccggggagaatggggctgctaagtcaaccttgattaaggctagccttggcatcttacagcccaaggttgggactgttgagatttcaaagacgaatgtgaagggaaagaagttaaggattgcttatttgccacaacaaattgctagttttaatgcagggtttccaagtacggtctatgaatttgtgaagtcaggtcggtaccctcgtaaaggctggtttcgaaagttgaatgagcacgatgaaaaacatattctgaagagtttagattctgttgggatgctggactttaaggatcgagcgattggttctttgtctggtggtcagaaacagcgggctgtcattgctcggatgtttgcttcagatccggatatctttgttttagatgaacctacgacagggatggatgcgacgacaaagagtgatttttacgagttgatgcatcacagtgcgcatcaccatcaaaaatctgttttgatgattacgcatgatcctgaagaggttagccaatttgcggatcggaatattcatttggttcgtgaccaaagctctccttggagatgttttaatgtccatgatactgaaggggagggtgaccatgcttgatttattccagtatgattttatgcaacgggccttgttggctatggttgcgatgagtcttttttctcctgtattagggattttcttgattttaagacggcagagtcttatgagtgatacgctaagtcacgtttctcttgcgggtgtcgcttttgggcttttccttgggatctctccaacgctctcgaccatgatcattgtcattattgctgcggtttttctagagtatttgcggaccttatttaaggattttatggagatcgggacggcaattttaatgtccactggtcttgccctagctttggtactgatgcgtggtggtgggaagagctccatgagtttggatcaatacttgttcggttctaccctaaccattacggatgaacaggtgatcgccttatttgtgattgctttcgttgtattagtgttaacagccttattcttgcggcctatgtatattttgacttttgatgaagatacggcttttgtagatggccttccggttaggaccatgtctatcttatttaatgtggtaacgggggttgctatcgccttaatgattcctgcagcaggatcgttattggtttcaaccatcatggtcttaccggctagtattgcgctgaaattagggaagaacttccgtggggtcatgctgattgcggtcatcattggttttatcgggatgtttagtgggttgattttgtcttatattgcagatacaccagcgagtgccagcatcacgcttttatttgtggcactgttcttgcttgtgaatcttggatcacgtttgaggaagtagttatgaactttaaaaaatttggttggttattgttagtggctttaacacttgttttgacagcttgtggcaaaagtcagagtcaaaatgggaaattaaaagtgatgaccactttctatcctgtttatgattttacaaaaaatattgtcggagatgaaggaacggtagacctgctcattggagcgggatcagagcctcatgaatatgaattgtctgctaaagggcgggctatgattcaagattcggatgttttcgtctatgaaaatgaaaatatggaaacctgggttccaaatcttttgaaatcaatgaaggataagaaaactaaagtgatcgatgccaccaagggcatggtcttgcttcctggattggaagaggaacatgaacacgaagggggcgaagaacaccatcatgaatatgatcctcacctttggctctctccccatcgtgccatgaagatggtagagtcgattcgtgatcagttggtggcagcttatccagataagaaaaagacgtttgagaaaaatgctcaagcctatctaaagaaattacaggccttggatcaagcttatcaggatgggttgaaagatgcaaaacaaaagaatttcgtgacccaacacgcggctttccgttacttggccttagattatggcttaaatcaggtagccatttcagggatttcacctgatagcgagccttctgctgcacgattgcgtgaattgacagagtatatcaagaaaaatgagattaaggtgatttactttgaggaaaatgcttctaagtccttggcgaaaaccttgtctgctgaagctggtgttgagttggctgtcttaaatcctttggaaagcttgacggagaaagaaatgaaagatggcgaagactacgtgtctgttatgaaggagaatctgaaggcgctagagaaaacaacgtcacaagctggtaaggatattcaaccggaacatgaggaagattctaagacagttcaaaagggctatttcgaggatagtcaagtgaaggatcgtagcttagcaaattatgcaggtgattggaaatcggtttatccatacttgcaagatggaactttggatcaggtctttgattataaggcaaaattaaatccaactatgactgctgctgagtataaggaatattatacaaagggttaccaaacagatattgatcggattaagattgataaggactcaatggagttttatcaaaaaggatcttctaagaaatatacctataaatacgtaggtaagcacattttgacttataagaaggggaatcgtggtgttcgttatctctttgaagccaaggagagcgatgcgggagacttcaaatatgttcaatttagtgaccatgaaattactccggtaaaggcagctcacttccacattttccatggaggaaagagtcaagaagcgctttatgatgagttggaaaattggccaacttattatccttctaacttatctggtttagaagtggcacaggaaatgctggctcattaagagttgtatcaaaagagagactaggactgattatcccggtctctttttgattaaaaatggggagtgaagcttgtcaaatgcttgaaaatacgttacaatgaaagggctttaagttaaaaaatgtatggggaattttaaatgaaaaaagttggtgcaattcttgtgagtcttctcagtgtggtcctgttggtagcttgttcgcaacagggagcgagtaaaaaatcaaccgcttcctctagtcaaacgacgacctcttctgaggtcaaaaagacggatgcttctagttcggaagtgaaggagaaagaaaaaaaagaagagaaaaaagaagtgaagaaaatggatcttgaagcgattgccaatggagattacagcagtattgctggtgtctggcaagatgataaaggaaacaagctagtctttaacgacaaaggtttggtctcacaagagttagagggctatggagcttctttgacggattatggaacagcatcagaaggcatttatggtggtcgtgatggaggcttcttgttggagtatattcctgcaggagtgaccattggtgatcaggtcgatgatcaaggacaagtcgtctttaaagatacatcagatgcctctaaaaaccgcttatggtctggtgttggtatcgctagttttggggaacaaggctcgatctactatcatgtaggggatgaataacggaaaaaagaggctaggacttttgtcctagcctctcaattatttttggattgtcgagcaagacgcagtggttgagtgggctctactacgctgatttcatcagcttttacagccctactcaactgtgcggaggtgggacgacgaaatcgaattctaacgaattaccgatttctgtcccactctctttttcttatgcatgtggggggagccaagaaagctcaaactggagcaattgggcttcaaggagatcttgatgggacacctcttgtttctctttgccatctaatagggctttttggatgaaataggcgcctgcagtgtgtgagttggtgcaaatcttaagctcttgcttgggaagatggagaaggacttctttaaagagagggagtcccaaatcatagattggttttcctgggcaggttggatagagcccaagggctgaccagatgtaccaagcagatagactaccattgtcctcatcacctggataggcttggaaatcttgatggaaagcttgggaacggatctggtggatcaggagattggtgtattcaggatgaaagctgtgacggaagaggtagggaaggtgaaagctgggttgattggagatggcaatctgcccaaatggggattgggccatttcactcatttcgtggatttcatagccatatcctctgacgtcaaattgaggtctttgattggccagatccagcaatcgttgggtgaaggcttttttgccacccataagttctatcaggccggagaggtcgtgtaaggctccaaaagtagcttgggtggcagagcattctgcataatctcctccccagctggtaggagagaagggttctttaaagtttccattggtggatcgtgctctcataaagcctgtttgggcatcgtacaatgttcggtaggagaggctggaagcagcataccgagcggctgtttctgtatgccccaattgcttggcaacgctagcaatgcaaaaatcactataggcataatctaggctgtggctcacactttcgtgaaaatcatcgggtaggtagccaaggaccatgtagctttcattgccatggcgaccaaaatgttgagtaggatctgttttttgggctgtctggagcatagctgtgagcatgttttcatgtaggtctggtgcaatcccttttgtgacagcatccgcaaagacgccatcgatgagggtgcctggcatcatccctcgttcatctggggccaaccattttggtagaaaaccagtatcctggtaagtgtttaaaaatccttcgagaaagtgacggtaataatcggggtagacaaggctaaagagcggaaaagaggtccgaaagaggtcccaaaatccgatattggtataagcttttcctggtttgatttcattatgagtgacatccaggtgccagtcatttccctcggtatctgtttcataaaaggtttgagggaaaaggaggagtcggtaaaggcaatggtcgaaaaaggcttggtcacgccctccggcatcttttacttcaattcgttttagcagttgattccattgatcggctgcttcttttttagcttcctctagggaagggttgggaagatggctgtgagccatgtcttgggacagataagaagttcctaattggacggtcacttcattgctagcaaaggtcagaaaaagatcttgattgatgtgagtgacgctctcaatcggctggctaaattgccactggagatagaaagagtaggaagtatctgcggtatgagcctgatccagaatgtggaagtggcaggtttggtctgtaaggctcaagtcctctggttcatttgctgcatgaaagcagagtgtcagtttttctggtgctcgaaagcgcatgacagccccgtagcagcttggaaccagctcgctttgaatctgataacgttccgaaaaaatccgaaggtagtggggctggaaaacggcttctttcatcgaataactgctttgacgacggaagaggtcggaacttgcaacttcccctgtgatgggcgtgatgaggcaccaagcgtagtctcctatccaaggactaggctggtgggtgaggcgaaatccctgaaaaatagggagattggggttaaaaaaccaagccccttgttcgtgtgtcgtctggggaaggaagtagttcatcccaaaagggacaccggtataagggagggtatttccgtgggaatagtggggatgattatcgcttccccagcgggtatcgatggtctggcaatgtgtgcgcatcttgtctcctttttcttcatcaaccttaaatgatctgtgtttttcttggaacacgcagtggtattttcttcaattgtatcaaagcgttgtcaaatatgatagcgtttttatcaaatggaaaattttgtagaaaaagggctatagtttgcgtatgtatttcccttttgaaatcttttatactgaataggaaagaatcgatacgtgtgaggaaaataaatgacctattcaaaagaaattgtgcgagaatggttggatcaagtggctgagcgagctaaggagtacccggagtgggtggatgtctttgaacgttgctatacagacactttggataatacagttgaaattttagaagacggttcaacctttgtgttaacaggggacatcccagctatgtggttgcgtgactcaacggctcaattgagaccctatcttcatgtggctaaacgagatcctcgtttgcggcagaccattgctggcttggtcaagcgtcagatgaccttgattctcaaggatccctatgccaactcttttaatattgaggagaactggaagggccatcacgagaccgaccataccgatttgaatggctggatttgggagcgcaagtatgaagtggattcgctttgctatcccttgcaactggcttatcttctttggaaggaaactggtgagactagccaatttgatgaaacctttgtcacagcgaccaaggaaattcttcatctctggacagtggagcaagaccacaagaattccccttatcgctttgttcgggatacagatcgtaaggaagacacgctggtaaatgacggatttggtcctgactttgctgtgacaggaatgacctggtcagccttccgaccaagtgatgactgctgtcagtatagttacttgattccgtccaacatgtttgcagtggttgttttgggttatgtccaagaaatctttgcaacattgaatctagctgatagtgaaaggatcattgcagatgccaaacacctccaagcggagattcaagaagggatcgaaaactacgcctacactactaacagtaagggtgaaaagatttatgccttcgaagtagacggtttaggaaatgctagcatcatggatgatccgaacgtgccaagtttgttagctgctccttatcttggctactgcgcgatcgacgatgaggtctaccaagctactcgtcgaactattttgagctctgaaaatccttacttctatgaagggaagtacgcaagcggactcggaagttctcataccttttatcgctatatctggccgattgctttatctattcaaggattgacaacgacagataaagctgagaaaaaattcttgctggatcagttggttgcctgcgatggtggaacaggtgtcatgcacgaaagtttccacgtggatgatccgactaaatactcgcgcgaatggttctcttgggccaacatgatgttctgcgagttggtcttggattacttggatattcattaataagctgtcgctcaacagattcttgtaaagaatcacaaatatatctttaaatttaagttagaatgaggttttactcatggaaaatgttgttgtacatatcatctctcatagccactgggatcgtgagtggtatctaccttttgaaagccaccgcatgcaattggtggaactgtttgacaatctgtttgatcttttcgaaaatgatcctgaattcaaaagcttccacttggatggccaaaccattgtccttgacgactatttagaaattcgccctgaaaatcgcgataaggtgcagcgttatatcgacgaagggaaactcaagatcggacccttctatatcttgcaggatgattacttgatttccagtgaagccaatgtccgcaataccttgattggacaagcggaatgtgccaaatggggcaaatcaactcaaatcggttacttcccagatacctttggaaatatgggacaagctcctcaaatccttcaaaaatcagggattcatgtagcagcctttgggcgtggagtgaagccaattggatttgacaaccaagttcttggagatgagcaatttacttctcagttttctgagatgtactggcagggggcggatggtagcagtgtgcttggtattctctttgccaactggtacagtaacgggaatgaaattccagtggataaagatgaagctttggctttctggaaacaaaaattggcagatgttcgtgattatgcatcgaccaaccaatggttgatgatgaatggttgtgaccaccaaccggttcaacgaaatttgagtgaagccattcgtgtggccaacgaactctttcctgatgtgacctttattcacagttcctttgatgactatgtgcaagcagtggaaagttcccttcctgagcaattatcaacggtcacaggtgagttgaccagtcaggaaaccgatggttggtacacgctggcaaatacgtcttcctctcggatttatctcaagcaagccttccaagaaaacagcaacttgctggagcaagtggtggaacctttgaccatcattactggtgggcacaaccacaaggatcaattgacctatgcctggaagacactcttacaaaatgcgccacacgatagtatttgtggatgtagcgtggatgatgttcaccgtgagatggaagttcgttttgccaaggtcaatcaagtcggaaactttgtcaagaccaaccttctgaacgaatggaagggtaagctagcgactcaaaaagctcagagtgagcatctctttacggtcatcaacactggattgcacaataaggtggataccgtcagcacgattgtcgatgtagcggtttgtccatttaaggaattgcatccgacagaaggcttcaagaaaatggctgctttgagcttgccagactaccatgtagaggatttagatggacatcttgtagaagcagagattgaggacttgggagcaagctttggctataccctgcctaaggataaattccgccaaccctatattgcacgtcaagtgcgcgtgacggttcctgttcatttggcagccttgtcttggacgaccttccagctcttggaaggcaaagcacttcatcatgatggtctgttccaaaatggggtgattgatacgccatttgtaacccttagtatcgatgatggcttgaccctctatgataaaacgaccaatgaggcttatgaggatttccttcgctttgaagatcgtggggatatcggaaatgaatatatctacttccaaccaaaaggaacagagccgatctatgcgaacttaacagcttatgaggtcttggaaaacaatgcccgctatgccaaaatcttgctcaagcatgacttgacgatcccggtcagcgcggatgaacaattggatgcggagcaaagaggcattatcgagtttatgaaccgcaaggcaagtcgctcagaagagctgacaaccatccctcttgaaacggagatgaccatctttgtagatgatccgcaaattcgcttcaagacgcgcttcaccaatacagctaaggatcaccgcatccgtctcttggtcaagactcacaatacacgtccaagcaacgattctgaaagtatctatgaagttgtgacacggccaaataaaccggctgcttcttgggaaaatcctgaaaatccccaacaccaacaagcctttgtcagcttgtatgatgatgttaaaggagtgactgtatctaacaaaggattgaacgaatacgaaatccttggagacgacacaatagctgtaacacttcttcgtgcttcaggggaactcggtgactggggctactttccaacaccagaagcacaatgtttgcgggactttgaggtggaatatgcagtagaatgccatcaagctcaggggcgcttctctgcttatcgccgagcgaaagctttgcagacaccgatgaccagccttcaagttgaaaaacaagaaggaagtgtagcagcaacaggtagtctcttcaaccatccatcactgagcttgccacaagtctgcccaacagcctttaaggtagctgaaaatgaagaaggttacgtccttcgttactacaatatgagccaagaaaatgttcgtgtgtctgacaaacaacaaactattcttgacttattggaacgcccatatccagttcattcaggactattggcgccacaagaaattcgtacagaattgatcaaaaaagaagaaatctaatttcaaaaagataacataaaaagaaaggaggagcgaaaagagtaagaaccgactgctgactcgctcctttttacaggtaaaagcaatgaccattgcaacgattgatatcggagggactgggattaagtttgctagtctcactccggatggaaagattttagataaggccagcaccccaacgccagagactctggaagagttgctagcttggttggatcaacggttatcagaacaggactaccgtggaattgctatgagcgtgccaggggctgttaaccaagaaacaggggtgattgaggggatcagtgccattccttatatccatggtttttcatggtatgaggcactttctcatcataagctacctgtccatctagaaaatgatgccaactgtgttggactgagtgaactcctagctcatcctgagattgaaaatgcagcctgtgtcgtgattggtacaggaatcggtggagccatgattatcaatggtaagcttcaccgtggacgtcatggtttgggcggtgagtttggctatatgacaaccatcgagcctgcagaaaaactcaacaactggtcgcaactcgcttctacaggaaacatggttcgctatgtgattgaaaaatctggtcagtctgactggaatggccgcaaggtgtaccaagaggcggcagcaggcaatgccctttgccaagaagctattgagcgcatgaatcgtaatcttgctcaaggattgctcaatatccagtacttgattgatccagatgtgattagtctgggtggctctatcagtcagaaccctgattttatcaaaggggtgcaaaaagcagtagatgcttttgtcgaaacttatgaagaatatacaattgctccagtgattcaagcttgcacctatcaggcagatgccaatctctacggtgcccttgtgaactggttacaggaggaaaaccaatggtaacttttacaggacttagtcccaaacaagcccaatctatcgaagtattaaaaaatcacatttctctaccagatgtagaagtggcagtcgctcagtctgaccaagcttctatctctatcaagggtgagaaggggcagtatcaactgacctaccgtaaacctcatcaactctaccgtgctttatctgtgctagcaacagctttagcagaaggggacaaggtagagattgaagagcaggcggcctatgaagatttagcctatatggcggactgttcgcgcaatgccgtgatcaatgtcgcatcagccaagcagatgatcgaagttctagctctcatgggctactcaacctttgagctttacatggaagacacctatcaaatcgaggggcaaccttactttggctatttccgtggagcttatgctgctgaagagttacaggaaatcgaaagctacgcccaacagtttgacatgacttttgtcccctgcatccaaaccttggctcacttatcagcctttgtcaaatggggggttaaagaagtgcagcaactccgcgatgtagaagacattctcctcattggtgaagaaaaagtctacgacctgattgacggtatgtttgcgacgttgtctaaactacaaactcgcaaggtcaatatcgggatggacgaagctcacctggttggtttgggacgctaccttatcttgaacggtgtggtggatcggagtctcctcatgtgccaacacttggagcgcgtgctggatattgcagacaagtatggtttccactgccagatgtggagcgatatgttcttcaagcttatgtcagcagatggtcagtacgatcgtgatgtcgaaattccagaggaaacgcgcgtttatctagatcgtctcaaagaccgtgtcaccttggtttactgggattattatcaggatagcgaggaaaaatacaaccgaaacttccgtaatcaccacaagattagccaggatatcgcctttgcaggtggggcttggaagtggattggttttacaccacacaaccatttcagccgtctcattgcagtagaagccaataaagcctgccgtgccaaccagataaaggaagtcattgtgacgggctggggagacaatggtggggaaacagcccagttctctattctgccgagcttacaaatctgggcggaactcagctaccgcaatgatttagagcgtctgtcagctcacttcaagaccaatacaggcttatcggttgaggacttcatgcagttggatctggccaatctcttgccagacctaccagacaatctcagtgggatcaatcctaaccgttatgttttttatcaggatgttctctgcccaattcttgacaagcacatgacacctgaacaggacaagccacactttgccagggcagctgagactctttctgacattaaagaaaaagcgggcgtctacgcttatctctttgaaactcagtcacagttgaatgctattttaagtagcaaggtcgatgtaggacgacgcatccgtgaggcctatcaagcaggtgataaagagagcttgcaacaaatcgctcaggaagaattgccaaaactcagaagccagattgaacacttccatgacctctttagccaccaatggttgaaagaaaacaaggtctttggcttggataccgtagacattcgtatgggtggactcttgcagcgcatcaagcgagcagaaagtcggattgaaaactacctagcaggcgaaatctctcgtatcaatgaactagaagtagagatcttgccattcaacgatttctacggggatcaggacttcgcagccacaacggctaatcagtggcataccattgcgactgcgtcaactatttatacaacgtaaaaaatgccaagttggatgacagatgtcttatccatggtggataggagtagaagaggagctgtgtttacaatcgcccttttctactcctattttaaagctatgtcataaatttgtagaattttttctataattaggagtttgaaaatagaaaatgcctatcttataataagtattgtaaacgctaccaaggcaaaaacacgctcaaggctcaaaggggggagttaaatgaaaaagtttgtaaggactctgagagaaaatttcatttttcttttaatggtcttacctggtgcagcgtggttaatcttattcttctatattccggtttttgggaatatcgtagcatttaaggactatcatattacaggagaaggcttcatcgacagtgtcatgaagagtaaatgggttggttttgacaacttcaagtttctctttagttccaaagatgcctacattattacaagaaacacggtattgtacaacttaggattcatcttcttaggattgattgtttccgttgggatcgccatcatctttagtgagttgagatcaaaaagagtggtcaaggtgcttcaaacctccatgctcttcccatacttcctatcatgggttatcatcagcttcttcaccgatgccttccttaacgtggacaaaggattggtcaaccacatcttaacttcatttggtatgaaagccatcaatttctactcggaattgtggatctggccagcgcttctcctcttcttaggaatctggaaaggctttggttatagtagtgtcatgtactatgcaaccatcatgggaattgacccaacttactatgaagcagcgaccgtggatggtgcgtctaagtggcaacgcattcgcaacatcaccattcctcagttgtcttccttgattacagtcttgaccattcttgcagtcggaaatatcttccgcgcagacttcggtctcttctaccaaatcccgcataatgctggagcgctctatagtgtgaccaacgttattgatgtttatgtctacaacggtttgaccaagtcaggggatatcgggatgacagcagcagccggtctttaccaatcggtagtcggtttggttcttgttttaatctcaaatatcattgcccgtcgcattgataagaatgccgctctcttctagaaaggaggatcgtatgaaaaaatcaaccattcaaaaagaaaaaattgataatgtcgggatccattctttcagtaagaagagcaacttcttctttaccttgttgttgaccttagtcggattgacctgtgtgcttcccttcatcttcgttgtcatgatctctttgactgacgaacaaagtttggcagtccatggcttccaattctggccagcaaaatttggatttgatggttacctcttcttggtacagttcaaagacaaaatcttgcaagccctcttcattaccttgtttgtgaccattgtgggaacagcatgtaatgtctttatcaccacaacctatgcttacgcaatctcacggagtacctttaaataccgcaagttctttaccgtattttcactccttagtatgctctttagtgcagggttggttccaagctacattgtgaccactcaactcttgcagttaggtgataccatcggggctttgattatcccaatgttgctcagtccatttaacatcatcttgatgcggaccttctttaaacggaccattccagaagctatccttgaatccgctcggatcgatggggcaagtgaaacacggatctttttccaaatctgcttgccattgtctctaccagggattgcgactatcagtttgttcactgctttagggttctggaacgactggttcaatgccctcctctatattaagagtgacaacctttacccattgcaatacctcttgatgcaaatccaaaacaatatggattacatcgctaaaaacgtcggggtatccggccaattggcaggagctgtacaatccatcccacgggaaacaggacgtatggccatggtggttgtggcaacagtgccaatcgccattctctatccattcttccaacgctactttgtaaaaggcttgaccatcggtggtgtgaaagaataacatcgttcattgaaaatcagcaggattttcaactcataacttagtctaaaaagaaaataacataaaggagatttttcttatgaaaaattggaaaaaatacgcgttagcatctgctagtgtcatcgctcttggagctactcttgctgcttgtggaaaccttacagggaacaacaagaagtcagcaacaactgaagacggtaaaccaatcatcaagatgtaccaaattggtgataaaccagataacttggatgttcttcttaaaaatgccaacaagatcattgaaaagaaagttggcgcaaaattggatatccaatatcttggttggggtgactacgcacaaaaaatgaacgttatcatctcatctggtgaaaactatgatattgcctttgctaataactacgtgatcaacgctcaaaaaggtgcctatgctgacttgacagaattgtacaagaaagaaggaaaagacctatacaaagcacttgacccagcttacatcaaagggaacactgtaaacggcaagatctatgctgttccagtagcagctaacgttgcatcttctcaaaactttgcatttaacggaccacttcttgaaaaatatggtatcgacgtttcaaacgtgaaagactatgcttctcttgaaccagtcttgaaagccatcaaagaaaaagatccaaacgttgttccatttgcaatgaacaagagctacggcggaccttcagatgacttcgactacgtggctgttgatggacttccattcgttgttgacttgaaaggtgatactactaagatcgttgaccgttacaccattcctcgttatgtagaaaacttgaagactcttcacaaatactacgaagcaggatacattccaaaagacgtagcaacgagcgacactggttacgatctttctcaagatacatggttggttcgtgaagaaacagtaggaccagctgactacggtaacagcttgctttctcgtgtagcaaaccgtaagatcgaaatcaaaccatttactgaactgtacaagaagaacaatactactcaagtagctaactttgttatctcaaacaactctaagaacaaagaaaaagcaatggaagtgttgaacctcttgaacactgatccagaactcttgaacggccttgtttatggaccagaaggcaagaactgggaaaaagttcccggcaaagaaaaccgtgtcaaagtcttggatggctacaacggaaacactcacatgtctggatggaacactggtaacaactggattctttacatcaacgaaaacgtaacagatgaacaaattgcacaatctaagaaagatttggaaactgcaaaagaatctccagcacttggcttcatctttaacacagataaagtgaaatcagaaatcactgctcttacaaatactttgaaccaattcgcaggtgcgatcaatactggtacagtggatcctgaagtagaagttcctaagatgcttgaaaaattgaaatcagaaggtgcttaccaaaaagtgcttgacgaaatgcaaaaacaatacgacgaattccttgcttctaaaaaataagaacaggtagtgcgaaaaggctttggaggaatctccagagcctttttaatcctttatgaaaatgaaccctggaaatgaaaatcaatatttcaatttactaatgtaaatgcgggaaagcgttttatttttatggtataatagaatgactaattggaaaagaggctgaatgatggggaaaatcatcgagttcatttttacgagagtctatgttgccatgctggtaacagggattttttgggtcttgacgatctgtgggggcatccttctaggagtaggaccagccagtgccactatcatgagcctctatgcggaaaatggcatgacctacaaggactatcattggtcacgcgcttgggaactcttcaaagaaaatctggttccggccaatcaagttttttacaccttctttgccattgaaggaatcctcctctatggcatgtacctcatgatccagattcctcacttaaatttcttccaaattttggttcttctgtttaatctagttttcctcttggttgcgcctctagcttacgctgtttatttgaaattgcaagtgcattttgctctctcttatgccaacagtatcaagctcagtttgatcggaatgttgctggacattcgtccagttcttaagctcatccttggaacagcactacttggtgtcattagctattatatgccagcccttctcttttttgtcttgatcggcgtctggcatttctttgtcaatgatatctttgaccctgtttatcaaaatatccacgaaaaattggtatcctaacgatgaaaaaaatctggttaagtacgcttttaaaattctacgcctatgtcatggtggtcattttgaccattatgggtctcgtcgtagcggggatctcttggaaaaaccagcaagctgaagccgatcggatcgcccaacgggtcttgactgaagtcgtgacggatctcgagacctcttatcagcgggtcacacaagaagggcgtagtctcgttgaaaaccctgcaaaattagaaggggtttatcgctattttaccttgtcaccatcggagtatgagacttggcgattgaatgcccagtttccttcttatatccaattgtccctacataagaatattgacagtctctatttgagcaataaaaacatcgagggtatcgatgtcaccttgtcggattacaagacagtatttgtctctacccggcaatcgaaggggggtaagcaagtttccgcggaccattacaaggctcctgcgacagccattccggttcctttgacagatccgactacgggtgctggagttgggattgcttatattactctggaccaggaaattttgacggcagcgattgacaatgctagaggagatctaccggttgctgtgcggatcttcacgccctttgggaaagaaatgtaccatgaaggggataaggagcaagcaaaagatgttaaatggcaaacccgtagcacgatctatggctacaaggtggatgtagtcgtttctgaaagttatttggtcaagaagggtctagctaacctgaccacttttctctccattgctttcctgattttcttgatcctgtacttgttattacggcagattttcaaaaattaccggcgtcaagtcctcgatttggtcgataccatgaatcagatcagtcaaggcgatagtgaacgtcggattgatacttcgacgaaggaccaagaacttttggtcattggtaatatgatcaataccatgttagacaatatggacaagaacattcgggatatctaccagttgcagctcagccaaaaagatgccaatatgcgggccctacaagcccagatcaatccccatttcatgtacaatacactggaatttatccggatgtatgccgtcatgcaagagcaggatgaattgggtgatattatctatgagtttagtagtctcttgcgcaataatatctcagatgagcgagtgacgacggttgaaaatgaactcgaattttgtcgcaaatacagctatctctgcatggtacgttatcccaaatcgattgcctatggctttaagatcgatccaggtttggaaaaaatgaagattccaaaattcaccatccagcctttggtcgagaactattttgcgcatggagtggaccataaacgcaaggacaatgtgatcagtgtcaaggtcttgcaaggagaagggcaggtcatcatcttgatcactgataatgggcgcgggatgaaagaagaacagctagaaagcattcaagagatgctagtcaatcgcaatccacgctcagaaatcgaagaaaagagtggtcggcagtccatcggaattgtcaatgtccatgaacgcatgctgctctattttggagatcgctaccatatccaagtcttctcccaacctcaccatggagtgacctatacgataaccattcaagatgaataaaggagacagaatgtacaaagtcttattagtagacgatgagtatatgattacagaaggcttaaaaaaattaatcccctttgaccactggaatatggaagtggtcgcaactgcagaagatgcagaccaggcccttgattatgtgcgagagtatccggtagatgtggtgatcacggatgtcaatatgcctgggaaaactggacttcagatgattgctgaaatgaaggatttgatcccagatgctgcctatatcattatgtcaggctatcaggattttgaatatgtcaagacagccctcaatttgcgtgtggcagactacctgctcaaacctgtcaataaggtggagatgggcaatatcctagaaaaaattcagcataaaatccagcaaccaagccaagagttggccaaccgcttgattcacgatgacatctctgaggaagagttttgtcggtatatcgcaggacgaaactcactgtggattggggttgctaaggagaaaaaaggctttatcagctcgtcttaccaagttctcgggcaaaatcttcaactctttatctcagatcaagaagaaaaagccatgattgagaaggcctttgagcccccttataaggagcactttcatcaatttaaggacctagtggagcggagcctcttttatggagcgacccctctcaatcaagatgaagaggtctttcattactacgagccggcctaccgggtgatcatgcaaggaaatatccaacagatcttagaagaactggactggttggaaaaaatgatccttgagaagacacccaaggtttcactgaccaagcagctctttatccaatttttgatggatgtctttcatttgtttgaatacctacaaggagatgatttggccgatgtggtcaagaaagtccaagaagctgctacctttagagagatgattagctttatccaggaagaattgtcccgtttcttatcccactatcggatgaacgaaaatgtagcgagtgtcctccaagtgattagccgtgattaccaaaaagagctgtcgctcaaggacatcagtcaggctctctttatcaatccagtctatttaggccaattgattaaacgagaaaccaatgcaacgttcgcagaactcctcaacaaacagcggattaaggctgcccagcagctcctcttatcgaccaatgacagcattgaagatatctgctataaagttggttacagtaatgtaggctatttctacaaggttttccgtaaactctgtgggaaatcgcctaaaacctatcgcttacaagtcatgacagagcatacagaagatgagtaaaaggctgagacaaatcgtctcagccttttaattgaagataaaatcttcttagaaactttccttaggagagtacataacagaaggttagggactctaaagctaagttttgagtatttttttatttgacaaaaataagtagacggtgtatactttataaaaagtagacaacgtatacttcgataagggaaggtggtcaaatgaaacggaatacggaagaactgaaagaaaagttaatttcggtcggcattgaagaaatcagaactaacgggattgaccggatgtctatgcgtacaatagctcaaaaatgtggggtgactcatggagctccctataagcattttggaagtaaagatagatatattcaagttgttatggaacacttatcaatgttctttttgaaaaatatgatacttggaattgatacttccatagatgcaataactcaactaactctgatgggctgtaactttgtaaggtttgcccaagaggaaacctatctatttgaagcattatttatcaaatttccatataactatatggagttgttccaggaaactatttcagtcaactcctctttaccaggatttgaacattttaagtcggtagcgttaagacttaaagatgaggaaaatctttctagtggtgacgcagaaattttgatccatttttggagttttattgctggtttggctctattggtaaggagtcctgttggagaaagctttaaagaaaatgatgttcaaaagaccgtcagaacgatgcttgatatttatataaaaggagatagctgatgaatgttttaataatctattcacatccgaatgaaacaagttataatgcatcaatccttcaaactgtgcaaaagcatttagcaccagagcatagagttaaaatagtagacttatataaagaaaactttgatccggttttacgttttgatgaaaggcataaaaggagagatttacagcataatgaagatatgaaaccatatagagatttattgagttgggcggatcagttgatttttattttccctacttggtggagtggaatgccagctattttaaaaggttttattgatcgtgtttttgttgcaggttttgcttatcagaatggacctcgaggtccggtggggcaactagatggaaaagcgtggatcattacgacgcataatacgccaaaaatttttcttcctttttctcaagactacgcaaaggttctaaaatctcaaatcttgaaaccctgtggtattaaaccggttaaaatgacacaagttacacgagtggagtatatgagtgatcgtcaacggaaagaagaactcgaaaaaatcgtacagatagccaaaaggatataaaaacgtgcgttacaagtcatgacagagcatacagaagatgagtaaaaaggctgagacgatttgtctcagcctttttactttgtattttaagtcctttgtatcttgattttcccaaccagcagctcagcttcgatggtgatttctgtaagttggctccagtcgattttttcttggtcaacgtgaaatagaaggggggtcatggcgaggaacgcctggcgttcttcaggagttaaactcttggtaaggctgaccgtttcggatgagaggaactggcagtggtcttcaaaatgctccaaaatttcctggttggagtaagattgcttggtcaattgatcttgggccaactgacgaatttcttttagatgagaagaggttgggacgaccttaatgatcaccccttctgtctttaagacacgttcaaattcagcgtaattagccggggagaagatgtccaaaatgacctccatactcttagattgaatgggtaaatgagccaaatctcctacaaaccaattgaccttccagctagcatcactcttggcagctacttgtacggattcctttgaaagatcaaatgcatagaaagtagcttggggataagcttcttgtagttttcgggagtaataaccttctccgcaaccgatatctagaatcttgccatcacaagtcggaattttttgtccgatcgctgttagaatcggctcataaaaccctgcttctaagatcagctggcgattttggaaattttctttgtcatagtcctttgattgcttgatctggggagccaggttaacatagccaaatttcgccaaatcaaaggaatgggccttgggacatttaaaactagtacccacaagttctaggtccaattgacagatgggacaggcaaaggcagtggctgtttgaaatcgttgtaattttggtttgatcggtgtattcatattagtagtgtaacaaaagagcctctagatagcaactgatgctttaatgggactaagtcacacttttttaacggttctacgcggaattgagtggaccttgagtttctttatctaattttgtccactggattgttcaggacggttttcaattctggacaatatttacttgtctcaaattcaatgatctcatattgagcaatcttattttgatagaatggatcgtgtgcaatgatttcttggacagcatctttattttttgctctcatgagaatgataccgccggtccttggattttttcttccagatgcgataaaatgaccttctgtataatactgatttaaaaaatctatgtgtttttctaagaatttttcaacttcatcaaggggcttgatataggtaagatttacaataaacataagtgactcctttaaaataaatgataaatagattataatactttacaaactacctgaatagtaggcacatttttgtaaggagaaaaaatgttaacaaataaaaattggaactgtagtatgtctcgagtcttagatgtggttggtgggaaatggaggatgaatatattatgggttataaacaagcataagaaagttcgtttcaatcaattgagaagagaagttgaagggattacaactatcagtttgacacgtggattagatgttttaatagagctccaattgattgagaaatatgattatgagtctctgcctcttcatacaggatatgagctgacagaaaaagggaaatcactgatgccgattttaaaggacttgaatcaatggggaaaagaatggttgcattaaattttcttctttttgtcactttcatcttgccacttaggttctcattttgaccgcttatcccaaaaggccgttttttaaacggcttttttgctagactgatattgtcaaaaaggagagagaacatgatattacaagctaaaaacatcagtaaacggtatggaaatcatctagcggttgatcatattcacctacagtttgaaaagggaacgtttaatgcgattctaggaccaaatggggcggggaaatcaacgacgatttccatgttgattggtttgaaacaaccaacgcaaggcgacattatttatgaacccggtactaaaattggtgtggtcttccaaaccagtgttttagatgagatgctgacggttagggaaaatctgaccattcgtgccagacagtacaaaggcctaaaaccaaatcgtgtgtctgatcttattgatcgactaggcctgtcagctttccaaaagcagaaatatgggacgctttcaggcggccaaaagcgtcgggttgacattgcgcgtgctctactgcacggcccagatcttctgttcttagatgagccaacgacaggtttagacattcaaacccggaagtctatttgggatttgctctatcaattgcagagagaagagggaatgactgttgtattgaccacacattatcttgacgaagcagatgaagctgatcaaatttatattgtagaccatgggaaagtgattgctcaaggatcggcactagatattaaaagccagtatgctactaatatcttaaagattcgtttcaaggagagacagcagatagaaagtctcaaatcttcgggaatgtcagtagagcaacaaagtcaattggagtatgttcttcaacccgagagtgaaagggaagccattgattacctggtacaagttagagataaattagcccattttgagtttcgtccagggactatggatgatgcctttattgcactaacaggaagggaggttcgctaatgctagccttactaaagcgaaattttttattgtattttaggaatcgttcaggtgttttcttctccttgttgggagccttgatttcctttattctctatattatttttcttcaaaaaaatctaacagatgcctgggctcagcttcccaatagtgctcctatgttaaataattggttaatgagtgggacgctggctgtgacagggattacgacaagtctggctgccctgactcagttagtaaaggaccgtgaacatcaagtagatcaggatctttatttatcggatcaaggaaagtggcggttagcattttcgtatctaacgagtgcaatcatcatttctttttccatgcagatccttatgtatgtgctgatgtgtggctattttagagaagttccaaccttatctctattacctgaagtgctcctcattatgctccttagtagcctactttctagcttagtgaacgtcatttttgtttattttttccaatcagtagacagtcttgggaagttttcgaccatagtgggtacagcttctggttttttggtagggacttatgttcctttgggggttctacctaattttgctcaactactaatgaaatgtaccccagctacttatattgctgcactttatcgacaagtcctcatgaaagaagcattaagtgagacctttaaaggtcaagataagcttcttcaagagtttcaagaaaaaatgggtgttcagctcaaatggcaaactttattgacaaaggaacaaacataccttatagtgttaggaggtattcttctagctttggggatttggatttccttggcaaaaagatcgagtaaaagaaagtaagtgagaattggagtaggaatgaagattcgttttgaggaaaaacaagatatcccagaaaacgacccctgtgtggtcattcaagccaagcaattatctgatcaagcacgagaggtgatggagtatctcgaacaattttcgacagtgaatcaagtagtgatccctatcaaaacagatgatcatttgatcatggtgaaaattgatgacattattctagctgagattgataagaatcagctcaccatttatacgacagacaaaacgttcaccatcagagatactttgataaattttcaacatcggattaatcgtcgtaattttttacagatatcacgccacgctgtgatgaatatcgaccatttagaatcgctatcggatagtttttcaggcaatatgatggctaaactgacacgtggagtaaaatcaagtgtcagtcggaaatatgtcaaatccttgatggattatttaggggtataggagaaagtgatgaaacgagttatagcttattttgtatctggtatgaggacaggatccttcttttatttgtgtttggtgttattatcccatgtctataccaacatcgtctatcccgctgtaaatgtccgcaacatcctagcgatatttttgatgagtgggacaatgggcatcttgaccttcattcttgaggaagaagagtttttgacctatagtttgcgtgtggctttgcatttagttgtgacagctgccatcttagcattaacctacttgttttttggctgggggacagccttacggagcccgattccttggttgatctttctagccatttacggcctgatctggctgtaccagatttggcagctccataaaaaaactcaacgaattaaccaagctttgttgcatcgcagaaaagggaaatagtcccagaaaaaagtgtataagaaaaccacgaagttcataccaaacttcgtggttttactttcttaataagtcaaaacaaagtattttttcttaccgcgacggataacggtcaattcattttctaatttatcgctatcgctcaagacatagtcaaggtcttgaatgcgttcgccgttgacgtagatagctccgttttgaacgtcttcgcgggcttggcgtttagaatttaccacaccagctgtgaccaagagttcaacaatgttgaggttatcttctgcttggacctggtagtttggcacaccacgaaggccttgtttgagttctttgacagaaaggtttttgatgtttcctgcaaagagttgttcggtgatgttgagggcttccttgtaggcttcttcgccgtggacaagggtaaccacttcacgcgccaagatcttttgagccaagcgttcgtgtggcgccgcttcaaactgtttgcggatctcttcaatctcatcaagtgacaagaaagtgaagatcttcaagaagcggacagcatccgcatccatcacattcatccagaattggtacatttcgtatggagatgttttgtctgcattgagccagaccgcattgccttctgatttaccgaatttcttaccagttgcatctgtgatcaaaggcacagtcataacatgaccagttttatctgctttacggcgcatcaactcagtgccagctgtcatgtttccccattggtcagatccaccgatttgaagggtgacattgtgttcttggttgaggacgtagaagtcatagccttgcataatttggtaggcaaactctgtgtaagaaatccctgtctcaatccgttttttaacagattctttactcatcatagcattgactgtaaagtattttccgacatcacgaaggaagtcaataaagctaatgcttccgaaccaatcgtagttgttgaccatttcggctttattgtccccattttcaaaatcgaggaaacgagacaattgtccttgaatggagcgaacccattcttgtacagtttcttttgtttggagactacgttcagcatctttgaaggacggatctccaatgagaccagtcgcaccgccaacgagcgcataaggtttgtggcctgctagttgaagacgacggctcgtcaagatggcaaccaagtgaccaaggtgaaggctgtcagcagttggatcataaccagtataataagaaacctgaccttcttccagtgctttgcgcaaggcttcttcatccgtcgtttgaaataccaaaccacgctcttttagctcatcaaaaatgtgcatgtgtcttttctcctttataagtttattcatttctctattctaccataaaccacggaaatggcaatgctttccatcattttcttgtccttacccaggaagaatgagtgacgatttctacgctcttgtgattgaaaacaaagggtctaatctgctataatatagggaacaaggagaaagaatcagtgaatcaaataaaagagaagctgcaagagttttggaagaaagtccaaaaattctttgcaaagatgtatacagaaactccgaataaggaaaaaaatgaagaaagtagctggtctgtcggtgatatttttgcgacctgtttgcggaccctcaaactcttgtgggatgtcatgatcgccctgttcgtgtgcctctttttatttggcgcagggatcgggattggttatgcggcgagcctctttagcaatgtcaaggttccaaagacagaagaactggtccagcaggtccgaaatgtcagcagtgtttcaaaactgacctattccgataagagcctgattgcagaagtggacagtgatttgatccgtacgccagtagcaggagacgccatttcagacaatgtcaagaaggctgtgatcgctactgaggatgagaattttgaaagccacaagggggttgtacctaaagccgttcttcgggcaacgcttggatctgtagccggcgtgggttcctctagtgggggatcaaccctgacccagcagttgatcaaacagcaagtcgtgggagacgctccaacctttactcgtaaggcgacagagattgtcgatgccctggctttagagcggggaatggataaaaatgaaatcctaaccacctacttaaacgtctcgccttttggacgaaacaatcggggacaaaatattgcaggtgtggaagccgcagctcaagggatctttggcgtctctgcgaaagacttgtctgttccacaagcagcctttatcgctggcttgccacaaagtccaattgtctactctccttatgctgcagacggtagcctaaagagcaaggagaacctcgagttaggtctggcgcgtgccaaagacgttttgttcaatatgtaccggacgggagccttgtcgaaaaaagactacgagacctatgctcagtacgacttgaccaaagacttcatggctccagatggtatcgagaaaacaccgcatgactacctctacttccaagccatggcagaagcaaaagaggccatgtatgattacttgatcaagcgagacaatgtcaccaagcaagacttgaaaaataatgaaaccgtcaaggcttatcaagaattagctgagagtgagttgcgcgaaggtggctacaccattcaaaccacgattaacaaaccggttcacaatgcgatgcaggccgcagtagcgaattttggaagcgtcttggatgatgggacgggtcttgtagaagttgggaatgtccttatggacaaccgaacaggtgcggttttaggatttatcggtggacggaattttgacggcaaccaaaacaaccatgcctttgatacagagcgttccccagggtctacaatcaaaccactgttggcctatgggattgccatcgaccaaggcttgatgggaagcaatagcatcctttctaactacccgactaatttctcaagtggtgagccgatcatgcacgtggatagccgagggacagccatgatggatctccgtgaggccctcaacacctcatggaatattccagcttactggacttaccggacccttcgtgaaaagggtgtggatgtcccatcctacatgaagaagatgggctatgatatccctgaatatggtattgagagtctgccgatggggggaggaattgaggtcactgttgcccaacataccaatggtttccaaaccattgctaataatgggaactacctcaaacgctacatggtagagcaaatcattgatcgagatggggatgtagtctacaagcacgaggcagatcctgttcgtgtttactctccagcaacggcaacgattatgcaggatctcttgcgtggggttattacgtctggtgctacaacgacctttaagtcacgaattagccaagtcaacccaacgctggcaggtgctgactggattggaaaaaccggtaccactaactcaaatggggatatgtggctcatgttgtccacccctaatgtttctttaggaggttggattggccatgacaacaatgcttctatgcagaccttgactggatacaacaacaatgcccaatacatggcgcagttggcgaatgcaatctaccaagcagatccaagtctctttggaattcaagataaatttactctcgataagagtgtgatccgctctgaagtgctcaaatcgactggtgaaagaccgggccgcgtcaatgtcaatggtcgggatatcgatgtgagcggtcaaatggtgacgagcctttgggccaaaaacggagcgccgaccactcaataccgctttgccatcgggggatcggatagcgattatcaaagcgcttgggcggccattctcggcaatagcagtggaactcagtcgaataataagaacaattcgacaaccaatagttcatcaagcaatagttcaaatcgaaacagctcaaatcgtggcaatcgacactagtctgatccagtagaaaacctggagaaagccttgatttttggagcaaaaaacggtataatagtgataactaatttgtcgtgtgctttatttgaaatattgtccaaataagagcttacagcagttaaatcttacttgaataagtcgatttagctgctctttttgtgcctatttttcagaaaaaacctagtttgttacacaaatttaatttttctaaaaattacgaaaagcgacgaatgaggtgaagagatagctcttcacgtgatgcaaatcacacaattgtagttaaaaccggataggtggtgaaagtcgttttaccaagctatcctagtatggaaaaaggagctaaaaactttggcaggacatgacgttcaatacgggaaacatcggacccgtcgtagtttttcaagaatcaaagaggttcttgatttaccaaacttgattgaaatccagacagactcattcaaagatttcttggatcatggcttgaaggaagtatttgaagatgtgcttccgatctcaaacttcacggatacaatggaattggaatttgtgggttatgaaatccgcgaacccaagtattcgcttgaagaagcgcgcattcacgatgccagctactcagcaccaatctttgtgaccttccgtttggtcaacaaagaaacaggtgaaatcaagacccaagaagttttctttggtgatttcccaatcatgactgaaatgggaaccttcatcatcaatggtggagaacggattatcgtatctcagttggtccgctcaccaggtgtctacttcaatgataaggtggacaagaatggtaagattggctatggatcaacagttatccctaaccgtggagcttggttagagcttgaaactgactcaaaagacatcgcctacacgcgcatcgaccgcacacgtaaaattccatttacaacgcttgtgcgtgctcttggattctctggagatgatgaaattatcgatatctttggggacagcgaattggttcgcaacaccatcgaaaaagatattcacaaaaatccaatggattcgcggacagatgaagccctcaaagaaatctacgagcgtcttcgtccaggtgaaccaaaaacagcggaaagctcacgtagcttgttggtagcccgtttctttgatccacgtcgttatgacttggcaccagttggtcgctacaagatcaacaagaaactcaatatcaagaaccgcttgttgaatcaaacaatcgcagaaccattggtggatgctgaaacaggagaaatccttgtagaagctggtactgtcatgacgcgcgatgtcatcgacagcatctcagaacaattggataatggtttgaacaaaatcacttacattccaaatgatgctgctgttttgacagaaccggttgaattgcaaaaattcaaagttgtcgctccaacagatccagaccgtgttgtcaccatcatcgggaatgcgaatccatctgacaaagtacgcattgtaactccagcagatatcttggcagagatgagctatttcttgaaccttgcagaaggacttggccgtgtagatgatatcgaccaccttggaaaccgtcggattcgtgccgttggtgaattgcttgccaatcaagtgcgtcttggactttcacggatggaacgaaacgttcgcgaacggatgtctgtacaagataacgatgtcttgacaccacaacaaattattaacattcgtcccgtaactgcagcgatcaaagaattctttgggtcttcacagttgtcccagttcatggaccaacacaacccactttctgagttgtctcacaaacgtcgtttgtctgccttagggcctggtggtttgacacgtgaccgtgccggatatgaagtgcgtgacgtgcactatacccactatggtcgtatgtgtccaatcgaaacacctgaaggaccaaacatcggtttgatcaacaacttgtcttcatacggacacttgaacaaatatggtttcatccaaacgccataccggaaagtggatcgtgaaaaaggtgtagtgaccaacgaaatcgtttggttgacagccgatgaagaagatgagtacatcgtcgcgcaggccaactctaagttgaacgaaaagggtggctttgctgagccgatcgttatgggacgtcaccgtggtaacaaccaagagttcccatctgatcaagtcgactacatggacgtgtctccaaaacaagtagttgccgttgcgacagcatgtattcctttcttggaaaacgatgactccaaccgtgccctcatgggtgccaacatgcaacgtcaggctgttccattgattgatccaaaagccccttatgtgggtactggtatggaataccaagcagcccatgactcaggtgctgcagttattgcacaacatggtggtaaggttacctatgcagatgcggataaggtggaagtccgtcgggaagatggttctttggacgtctaccatgttcaaaaattccgtcgttcaaactccggtacagcttacaaccaacgtactctggttaaagttggtgaaaccgttgaaaaaggcgactttatcgctgatggtccatcgatggaaaaaggggaaatggcccttggtcaaaacccaatcgtcgcttacatgacttgggaagggtataacttcgaggatgctgttatcatgagcgaacgcttggtgaaagaagatgtctacacatctgttcacttggaagaattcgaatcagaaacacgcgataccaagttaggccctgaagaaattacccgtgaaattccaaacgtcggggaagatgctcttcgtgacttggatgaaacaggtattatccgtattggtgctgaggttaaagaaggcgatatccttgtcggtaaggtaacaccgaaaggtgaaaaagacctttctgccgaagaacgtctccttcacgctatctttggggataaatctcgtgaagtgcgtgatacatcactccgtgtacctcacggtggagatggagtcgttcgcgatgttaagatctttacccgtgcaaacggtgatgaattacaatctggtgtcaacatgttggttcgtgtttacattgcacaaaaacgcaagatccgcgtcggagataagatggccggtcgtcacggaaacaaaggggttgtgtctcgtattgttccagttgaagatatgccttaccttccagacggtacaccggttgatatcatgttgaaccctcttggggtgccatcacgtatgaatatcggtcaggttatggaacttcaccttggtatggcagctcgtaacttgggtattcacatcgcaacaccagtctttgatggagcaagctcagaagatctctgggatactgtgaaagaagctggtatggatagcgatgccaagacgattctttacgatggacgtactggtgagccgtttgacaaccgtgtctctgtcggtgtcatgtacatgatcaagcttcaccacatggttgatgataaactccatgcccgttcagtcggaccatactcaatggttacccaacaaccactcggagggaaagctcagtttggtggacaacgtttcggggaaatggaagtgtgggcccttgaggcttatggtgcatcaaatgtccttcaagaaatcttgacatacaagtcagatgatgttaacggacgtttgaaagcttatgaagcgattaccaaaggtaaaccaattccaaaaccaggtgtaccagaatccttccgcgttcttgtcaaagaattgcaatcacttggtcttgacatgcgtgtcttggacgaagatgatcaagaagtggaacttcgtgaccttgatgaaggggaagacgatgatgtgattcatgtggatgaccttgaaaaagcacgcgaaaaagcagcaaaggaagcaaaagcagcctttgatgccgaagaatcagaaaaataatcagtaaaaatgattgtcctgtgagcaaccaatgcttctagcaggatgattcgataacaagatacagacacaaggaggtggcaagaaagtttcctttcttcctccacctaagctgtatccaaataaaacaagtatgaaaacaaggaaaggtaagaaatagtggttgatgtaaatcgttttaaaagtatgcaaatcaccctagcttctccaagcaaggtccgttcatggtcttatggagaggtcaagaaacctgaaacaatcaactaccgtacattgaaaccagaacgcgaaggtctctttgatgaagtcatctttggacctacaaaagactgggaatgtgcgtgtgggaaatacaaacgaatccgttacaaagggatcgtttgtgaccgctgtggggttgaagtaacacgtgccaaggttcgtcgtgaacgtatgggacacatcgagttgaaagcgcctgtatcacacatctggtacttcaaaggcatcccttctcgtatgggattgaccttggatatgagccctcgtgcccttgaagaagtcatttacttcgcagcttatgtggtcatcgatccaaaagatacaccacttgagcacaaatccatcatgacggaacgtgaataccgtgaacgcttgcgtgaatacggaccaggttcctttgtggctaagatgggtgcagaagcgatccaagacctcttgaaacaagtggatttggaagctgaaattgctctcttgaaagaagaattgaagactgcaactggtcaaaaacgtgtgaaggctgttcgtcgtttggatgtcttggatgcattctacaaatctggcaacaagccagaatggatggtcctcaacatccttcccgttattccaccagatcttcgtccgatggtccaattggatggtgggcgttttgctgcctctgacttgaacgacctttaccgtcgtgtgatcaaccggaacaaccgtttggctcgtttgcttgagttgaatgctcctgggattatcgtgcaaaacgaaaaacggatgctccaagaagcggttgacgctttgattgacaatggtcgtcgtggtcgtccaatcacaggaccaggtagtcgcccactcaaatcattgagccacatgctcaaagggaaacaaggacgcttccgtcaaaacttgctcggtaaacgggtggacttctcaggacgttccgttatcgccgttggtccaactcttaagatgtaccaatgtggtgtgccacgtgaaatggccatcgagctcttcaaaccatttgtcatgcgtgaaatcgttgcgcgtgatatcgtacaaaacgttaaagcggctaaacgcttggtagaacgtggagatgagcgtatctgggatatcctagaagaagtcatcaaagaacacccagttctcttgaaccgcgcaccgacccttcaccgtttggggatccaagcctttgaacctgtcttgattgacgggaaagcccttcgcctgcacccccttgtctgtgaagcctacaatgccgacttcgatggagaccaaatggccatccacgtaccgctttcagaagaagctcaagcagaagctcgtatcttgatgttggctgctgagcatatcttgaaccctaaagatggtaaaccagtcgttacgccatctcaggatatggtattggggaactactacctcactatggaagaagctggtcgtgaaggcgaaggcatggtctttaaagaccgtgatgaagccgtgatggctcttcgcaatggttatgttcacttgcatacacgtgtcggaattgcgactgatagcttgaacaaaccatggacagaagcacaacaacacaagattctcttgacaactgttggtaagattctctttaacgatatcatgcctgcagaacttccataccttcaagagccaaataatgccaacttgacagaaggcgttccagctaagtatttcttggagcctggtcaagatgtcaaatcagcgattgagaaattggaattaaacgttccattcaagaagaaaaatcttggaaatatcatcgccgaaatcttcaaacgtttccgtacaactgaaacgtctgctttcttggaccgcttgaaagacttaggttaccatcattcaacccttgctggtttgacagtggggattgccgatattccggtcgttgaagacaaggcagaaatcattgaagaatctcacaaacgtgtggaacaaatcacgaaacaattccgtcgtggtttgatcacggatgacgaacgctacaatgccgttacagctgaatggcgtgcagctcgtgagaaattggaaaaacgcttagtggataaccaagatccgaagaacccaatcgttatgatgatggactctggagcccgtggtaacatctcaaacttctcgcaacttgccggtatgcgtggtttgatggccgctccaaacggacggatcatggaattgccaatcctttcaaacttccgcgaaggtttgtcagtactcgaaatgttcttctcaactcacggtgcccgtaaagggatgaccgatacggcccttaagacagccgactcaggttacttgactcgtcgtttggttgacgtggcccaagacgtcattatccgtgaagatgactgtggaacagaccgtggacttgtgatccgtgccattactgatggtaaggaaatgatcgagccactcgaagaacgcttgacaggtcgttataccaagaaatctgttaaacatcctgaaacaggtgaagtcatcgttggtccagataccttgatttcagaagacctagcacgtgaaattgtcaaagctggtgtggaagaagtcactatccgctctgtctttacatgtaacacccgccatggtgtctgccgtcactgttatggtatcaacttggcgactggtgatgcggttgaagtgggtgaagcagtcggaaccatcgctgcccaatctatcggggaacctggtacacagttgaccatgcgtaccttccacacaggtggggttgcctcaaataccgatatcactcagggtcttcctcgtgtccaagaaatctttgaagcccgcaatccaaaaggggaagcggtcatcactgaggtcaaaggggaagtcacagcgatcgaagaagatgcttctacacgtaccaagaaagtctttgtcagcggagcaactggtgagggtgaatacgttgtcccttacactgcccgcatgaaagtcgaagtaggagatcaagtctctcgtggtgcggctctgacagaagggtctatccaaccaaaacgtctccttgccgttcgtgatgtcttgtcggttgaaacttaccttcttgcggaagtacaaaaagtataccgtagccaaggggtagaaatcggcgacaaacacatcgaggtaatggttcgtcaaatgatccgtaaagtacgtgtcatggatccaggagatacagaccttctcatgggtactcttatggacattacagactttacagatgctaataaggatgtccttatctctggtggagttcctgcgactgctcgtccagtccttatgggaatcaccaaagcctctcttgaaaccaacagtttcttgtcagctgcttccttccaagaaaccactcgtgttcttactgacgcagcgatccgtggtaagaaagaccatctccttggacttaaggaaaatgttatcattggtaagattattcctgcaggtacagggatggctcgttaccgtaacttggaaccacaagcgattaatgaagttgaaattatcgaagaagtgccagtaacagatggaacagtcgatgaagttcaaacagctgaagtcgtagaagaataagaaaattagtcggaactacatgttccggcttttttttgaaaaaattataaaaatttattatttgaaaaataattgtataattattgaattatttttttaccaaaaatattagcccggtagaagtcgtgctgtaaatacttacaattagtgattatatggatatgtattctaaacaccaaaataataaaatgactaactattagtaatttctttataaaaccaaaaatcggtttgacatttaaagtcattggcggtagaatgaaaaaagatgtacacaaattaaaaaaatgttgaattacatgtatgtcgacgggggaagtttatgggaaaattgaaaattatggttgtgtttgggacacgaccggaggccattaaaatggcccctttggtgttggagttgcaaaagcagagggagaccattgagaccattacggtggtcactgcccagcaccgtcaaatgctggaccaggttttagaaacctttaacatcgtacctgattacgatttggatattatggggaaaagccagaccttattagacattacctctaaaattctgaatcaattagatccagttatcaaaaaagaaaagccagatatggtgctcgtccatggagatacgaccactacctttgcggcgagtttggttgccttttacaataaagtccgcattggtcacgtcgaagctggtttgagaacctttgataaatattctccgtatccagaagagatgaaccgtcaaatgacggatgatctagcggatctgtattttgcgccgactggcgaaagtaaggccaatctcttaaaagaaaatcatccggaatcctctattgtggtgacaggaaatactgctattgatgcactgaaactcacggttcaagagaactatcatcacgaagtactggatcaattagatccagctaaaaaaatcatccttgtcaccatgcatcgaagagaaaatcaaggagctcccatgagagcggtctttggagctctgagagaaatggtggatcaagaaccggatattgaagtggtttacccagtgcatcttagtccagcggtacaagaggtggcaaacgatctattaggagatcatgatcggatccacctcattgagcctctagatgtgctggatttccacaacttagcttcgagaagttactttatcatgtcggattcaggtggagtgcaagaggaggcaccatcattaggaaaaccggtattggtattgcgcgatacaacggaacgcccagaaggggtcaaagcgggaactttgaaattagttggaacggatcctaccgtcgtcaaaacgacgatgacagagctcttaaccaacgaaagcctgtatcttcaaatggcaaatgcccgaaatccttatggggatggaagagcttctgagcgaatcgtacaagccattaaacattactttggccagggagaggctgccgaagaatttcatgagggagagaaagaataaatgaaaaaaacggaaaagttaagtagatggttgctgattttgattgttttcgaagtacttcttttactttactgcttgttttttgcaagagagattctgattgaagaaggattgttctttgttttaggattattttctgctattgtcttatcggatttattgttgacatggaccatcctgttgtcatttgcccttgggattgtctttttggtggcgggtgttgtctatatcccatttcatcaagccttgctcttgctctttagttttccgatcttgattggaatcttgacccgaattcgctatcacctctttaaagagattgcaaaagtgaaggatcaagagccagaagcttacgcagattaccgcaaccgcatcgcttcttatggcggacaaaccaatgatacgattcaggccttactcattcactggtcgcatgaggaattgttcttccaattgcaaccgagagaatacaatcggaccttgaaccaaatcaactatttggtaacgcatcatctaaagccaaatgaaagcttgtattatgtatcagatggtaatttcttgatcttatctgctgatagcgagcgggatctgaagggcgattatatgacagtcttaaaaccacagttggaaggactggtgttccaaggagaagatggggtgcaagccatccaatttcagtccggctttcttgtagtagatcaatcaaatcgcaccaaataccatcgctataaagaaatgattcgttacttaaaacgtcaacttgaaacagatattattgtggaatattaggaggaagacatgtctcttacaaatatattttttaatatagctgtaggcatcagtgtattttttgccttgtgctttattgtattatttgtagcttatacggtgatttaccgccgtgtcaataaaaactttaaggcggtggaccatgattagtcaaattgtgatgattattgccttgatttcgatttggttatccttagcctggggcttagtaatcctcttttcagccgttcatttttggtttaaacacagtgattttcgtgtcaatacggatccgcttccttattatccaaaagtgacgatcgtcgtacctgcccataatgaggatgtggtcattgcacaaacagctaaagcgatccttgatatgaactacccacatgatcgtgttgaattactgctctttgcggataattgttccgatcgcacctatgaagagtgtttggctgttaaagcattgccagagtatgcaggacgtgatttgaccattatcaatcgaagtggaacaggtgggaaagccggtgtgctaaatgacgctttggcgatggcgactggagactatatctgcgtctatgatgcagatgccatgcctgaaaagaatgctctttatttccttgtgaaagaagtgctcaaagatccagaacgtcatgtggcttctttcggccgcaataaaacgcggaatgccaatcaaaacttcttgacccgctgtatcaaccaagagattgttgtcacccaacgggtccaccatgtgggcatgtggcatctctttaagattggacggattccaggaactaacttcattattcaaaccgaatttgtcaagagtatcggaggatggaaaaacggtgccttgactgaggatacggatatttctttcaagattatgcaaagtgggaagttgattgcgctagcctataattcagaagccttccaacaagagccagagactctgaagagttactatatgcaacggaaacgttgggccaaagggaattatgaagtggttctttccaacttcaagcatttatttggtaagggaaattggcgcgtgaagttagaagtgaccaactattcctgtgtcttcttctggtttaatgcggccatcgtcttatcggacttgatcttttttgccaatattctggctatgtgtatccatacagtggtgccaggtgtgcaaattccatttgcctttgattcagaaaatatctacattgcgcaattgatgctcttcaattggatcttgatgattgggctttacctgcttcagattaatgtagcgctggcttcacaatttggtcaagccactaccaagcaaatttggttggccttggctgcctatttcacctattctcaactgtttatcattgtgtcgattgatgccatctcttcgattgtgatggataaactattgcaccggaaagaaaccaaatgggttaaaacaaaacgattcgcaggataggagagattatgaatacgaaaaagatgagatatgtatggtttctagtcatcctttgcattttctgtttgaccttgtttttagcgagaacgagaagtaaagtggagatgcgaaatcgaatttatcgtcagtggaatgagcattttgttgtttcaaaagggaaagaatcctatgttcgaaccaccaatgatagcaatcaaacggtagtgttatccgaggcgcaaagttatggaatgatcattactgttgcagctgccgaaaaaggacaagcccaacaagcagactttgaccgactctatcactattatctaaatcatcgcttggaaggtacccaattgatgtcttggaaacaaaccatcagcaatggaaaagcaaaggatgaggatcataacgctacagatggtgatctctacatcgcctatgctcttctaaaagccgctcagaaatggccaaagcaagccaaagactaccaggctcaagccaaagcgattttagaagatattctcgcacacaactacaatgaagaaacgggtgtgttaacggtggggaattgggccaatcaggactcggagttttatcatttgatgcggacgtctgatacactgccagcgcaattccagatcttttatgaagtgacaaaagattcaaagtggttggacatcaaagaaaagatgttgcaacaactccaaacgatcagctcccaaacaaaaacaggtttactacctgatttcatctgggtagatgagcaaggaacgcgcgtagcggatccaaagacgattgaatccaagtatgatggtgcctactcgtataatgcttgtcgtcttccatacaaccttgttcaaagtaaggacaaaaccagtcaacaattggtgaaaaagatgcttaactttttcaagagtcaaagaaacctgtatgcaggttatgacttgaaagggaaggccttgaacaatcatcaggcagcaagctttttggcaccgattgtctatgcctctgaacatgaaaaaggctatttgaagttggtgcaacagaacaagtatatctttacacaagatctacctctgaacaactattacgatgcaaccatgacaaccatgattgcacttgaattgttctaaatacttgagaagagagagttccccaggatggtctgtccattttgttgggactctcttcttttgattctcgaaaaaaggaaccaatagcaattaggcagtctatttttgaaaaataattgtgaaaatcacctgaaaactacctgaaaaatcatgctctgagcagaaaacttttattctcaaaggattttctatataatagaggatacaaaggatggaagagtttatgtatcgagtgattgaaatgtacggggactgtgaaccctggtggtttttagaaggttgggaagaagatatcgtgagtagtcggaagtttgaagactattaccaggctttgaaatactacaagcagaagtggttggagttaaatgagcactttccaagttataagagtcggagtgacctcatgacgatcttttgggataccaaggagcaagagtggtgtgaggactgcagtgaagatgtgcagtttttccattcgattgtcctcctagaagacgagcataagatccctaaaagcaagctccgcccaggctacgaaaaggaaagaggcagtcgcaaacaccgttcttgtcaatatacactcgattcaaaaaaggggacgaccctgtcataagagaaatgcggaagattttttagagcgatctagaaagtcttctttttttgtcttctttttcgaatagtataagtgagaggaggaactatggttcaagaaattgcaaaaaaactgatccgtatgggaaagaaggaagaggctcaggatctttacttcattcctcggaaggaggagtaccaagtttttatgagggtgggagacgagaggcgctttgtgcagtccttcccttttgaggacatgacggctatgattagccactttaagttcgtggcagggatgaatgtgggagaaaaaaggcgcagccagctagggtcgtgtgattacccattagaggatggagtggtctcgattcgcttgtcgacggtgggagattatcgtggctatgaaagcttggtcattcggctcttgcatgatgaggaacgtgaattgcggttttggtttgatcagttgccagacttgcagaagaaattggccggtcgtggtctctatctctttgcaggtcctgttggttcgggaaagaccactctcatgcatgctttggcgcaagagcgctttgcggaccagcaagtcatgtctattgaagaccctgtcgagatcaagcaggataatatgcttcagcttcagctgaatgaccagatcggcatgacctatgacaacctgatcaaactctccttacgccatcggccggaccttctcatcattggagagatccgagataaggaaacagctcgtgcagtcgtacgagctagtttgacaggagtcaccgtcttctctactattcatgccaagagcgttcgaggtgtttatgagaggctcttagagcttggagtgagtgaggaagagctcaagattgttttacaaggtatttgctaccaacgattaattgcaggaggaggtgttgtcgattttgcgacggaaaactaccaagaacactcagccagccgctggaaccaacaaatggatctcttggctcaatcgggatatatccagctggctcaggcacaagccgaaaaaattatctacaactaaacaaaagcaaatcattgaattgtttttgaatctttattcgagtggttttcatctgtctgagattgttgattttttggatcgttcccacctagtagagagtcatttggtctcccagatgcgagcagatctctctcggggtcggagtttttcagagatgatggcggggatcggtttttcagatgcggtcacgacgcagctgtctctcgctgagctccatggaaatcttgcattgagcttggagaaaatcagtgcttacctagaaaatatgcgcaaggtcaagaaaaagttgatcgaagttagcacttatcctcttatcttacttgggtttttaattttgattatgctaggcctgcgcaattatttgctccctcaaatggatgcacaaaatattggtacgcaattgatcagttcctttccccaactctttttggcgctcgtagcggggatagtggttctcttcttattcagctttctctattatcgaaaatctagcaagatcaaagtttttagaagcttgtcccatcttcctttcgggaaaggcatgattcaagcttatttgacagcctattatgccagagaatggggcaatctgattgggcaaggattggagctgtctcagattttttccatgatgcaggaccaaaaatcccagctttttcaagaaattggaagggacttagctctttctttagaccgtggccagtccttttcagagacggtcagggggtatccttttttcaaaaaagaattgccccttatgattgaatatggtgaagtcaaatcaaagctcggaagtgaactagagatctatgctgaaaaaacatgggaagatttctttcgtcgggttcacaaggccatgaatgtgatacaacccttggtgtttgtctttgtagctcttgtgattgtcttactctatgcagccatgttgctgccgatttatcaaaatatggaggttcatttatgaaaacattaaaaacctataaggttaaggcctttacacttattgaaatgttagtggtcttattgatcatcagtgtgctcttattgctctttgtgccgaatttgaccaagcaaaaagactccgtgaaagagacaggaaatgcagcggttgtgaaggtggtcgaaagccaggctgaattgtacgagctcaatcataccaatgaccaagccactctatcaaagctgattgcggatggaaatattaccaacaaacaagcagaatcttatcgtgcctattatgcgaaaaatagtggagaaactcgtgcggttgcagattaaggccttcaccttggtggagacccttctgaccttgatgatcgtcagttttatctatctgggcttatcgggatcgatcaggacgagctttcagcaggtggaagaaaaagtattttttgcagagtttgaacacctctatcaagaaagccaaaagatagccttggcaaggcaaacggaattggatgttgaagtgactgcaaggaagattcaaacgccttaccagacggtggagattcctgattctgtcattttgcaagatcctaaaactattcgtttagaccgagcaggtggcaattcatccctggccaatgttcactttcagacacagagaggagtggtgacctatcaactgtcgcttggaaatgggaaaattaaaaaaagcatccgttcccgctagtattctcatagaatctttggtagccttgggtttatttgccatgattacgaccttattgttaggggagatccggcgttcgcgcaaggagcgactagcggatttcaaagaggtagaggtcttatctgtcgctcaaatggcgcttcagacagggcaaaatcatctagaggccaatggtattcaggttcaagtagaaaaagatgccgatcaactcacggtctatcatcaagggaaggtggtactgcatgtggaataaaggaaaggtcaaggcctttaccctgctcgaagccttggtcgctctcttggtgctcagtgggggagtgttggtctttcaaggcttgaccaagctcctgcatgctgaattggactaccaggcacatcaaaagcaggaagaatggatactttttcagcaacaattgcaggtggaattggatcggagtcattttgaaaaagtagcggacaatcatatctacttggttcaggatcaaaaaccaattgccattggtcaatcgaaaggggatgatatccgaaaaacagatgataagggcaggggctatcagcctatgatttcaggggttcactctagtcagatttggcaggagggagagtcgcttcatctgcggttgaattttgaagatggtctagaaagggagtatgtctaccatgtggtaccagcgatacaaaatgaaaaaagttaaggctggtgtcttgctttacgctctcttgatggcagcgatttttagtctcttgcttcagttttacctgcaccgtcaggttgcggaaagacgaatcttaaagacgagtcaagatcgccttcgggcctatgctttggtgcaaatggctcttgaaaagagaaagagtgatgagaagacatcagagattcatttaaagtctggaacagttcagctaaagaaggatactggttttcttcatgctcaggctaagatggatggcgaaagctatgagtttgtccttcctgtaagggaagaaaaggaaagcaagaagagtcaaaaagaaaagaagaagacgcagaaagataaggagaaggcagggagcgaaaagccttctgaagagacgccaaaagaggccaaggagccatcagaaaatagcgaaaaagactaatttttggtatgatagggtgcggaggaaatcatgaatttcgaaaaaattgaacaagcctatacctatctattagaaaacactcaaagtattcaaaatgaattgtcgaccaacttttatgacgccttgattgaacagaatgccatgtatttggatggcaagacggatctagacattgttaaaaacaatagcaaaaaattaaaagaactagatttaagtaaggaagaatggcgcagagcctaccaattcctttttatgaaagctgctcagacagagcctttacaagcgaatcaccagttcacaccagatgcgattggttttatcattacatttttgatcgatcagttagccaaagacgaccaactagatgtcttagaagtgggaagtggaaccggaaatctcgctgagaccattgtcaacaatagccgcctcacgattgattacttaggattggaagtggatgatctcttgattgacctatctgctagtatcgcagatgtgatggaatccagtgttgtctttgcacaaggcgatgcggttcgcccacaagtgttgaaagaaagtgacttgatcgttagcgacttaccgattggctattatccagatgatgcgattgcacagcgctatcaggtggcgagctccgaaggccatacctatgcccatcacctcatgatggaacaggctctgaaatatctgaaacctcaaggagttgccatctttttagctccaaataatctcttgacaagccctcagagtgatctgttgaaagcttggctaacagacaaagcccaaatccttgccatgctgaccttgccagaatctcttttttcaaatccagcctatgctaagacgattttcgtcctacgaaaacaagaagaagagtctgttcagccctttgtctatccgtttaccgatctccaggatcaagaccaggtggttcactttatggaaagtttccaaaactggttaaaggatagtgaaatttgatcaaagatctgatataatagaggatgtgaaaacgcttaatgaggtgaatatatgtcgaaaacaatttctattaatgcaggaagctctagtttgaaatggcaattgtaccaaatgccagaggaaactgttcttgcaaaagggttgattgaacggatcggtttgaaggattctatttcaactgttaaatttgatggacgctctgaaaaacaagtattagatatccaggaccatacacaagctgtaaaaattttgttggatgatttgattcgctttgatattatcaaatcctacgatgagattacaggtgtgggtcaccgcgtcgttgctggtggagaatacttcaaggattctgccttggtagatgacgaagtccttcgaaaagtagaagaattgtctttgttagcacctcttcataatcctgcaaatgcagctggaattcgtgcctttagagagatttgtccaaatattaccagtgttgtggtatttgatacttctttccatacaaccatgccggaaaaagcttatcgttaccctcttccaactaaatattacacagaaaataaggttcgtaaatatggcgctcatggaaccagtcatcagtatgtagctggtgaagctgctaaacttcttggaaaaccattagaagaattgaaattgatcacttgccacgttggaaatggtgtatctgttacagcggttgacaagggaatctctgtcgatacctcaatgggcttcacccctctaggtggtgtcatgatgggaacccgtacaggggatcttgatccagcgattattccttacttgatggaacatacagaggatttcagtaagcctgaagatattagccgcatcctcaatcgtgaatccggtcttctgggtgtttctggatcttctagtgacatgcgggatattcatacagcgatgcataatggagacgaaaaagctaaattggcttacgatatctttatcgatcgtttgcaaaaatacatcggtcaatacttagcagtcttgaatggtgcagatgccatcatctttacagcaggaattggtgaaaatgcagtaaatgttcgctcttctattatcaatggaatcagctggtttggctgcaaggtcgaccctgaaaagaacgtctttggagttgtcggagatatttccacagatgattcccgtgtgaaggtattggtgattccaactgatgaagagttggtgattgcgcgtgacgttgaacgtttcaaaaatcagtaaactgaaataaagtgagaaggctggaggcgaaagccccagtcttcttattttatacaagaaagaggttgtccattgaaaaatatacagtcttttattcgagagcacccattatgtaagaatgccctctggctcctgctttttgtgcccttattctttctctcgcaattccccctcatcaccatggtttattcccttcaagaaggagtagatgcaaggtgggtcactatcctcactctcttggtaacagtggcggtgctctttgttttttataaggtcatcaagatgagccctctggagaacttagatgttcgggtcattacctggccggctctggggagaaatttcctttttcttctcttgttgatggctaataacctgctcgcttatcccttgttgaaacaagaggcaggtggtacgacggcaaaccaagcggctctaaatgaactacaatctcatgctccttttcttgctatgggaatggtcgtgatccttgtcgctccgattctagaagagctgctttgtcgggccattatccctcgtttgatctttcgaggggcagaaccaatcggttatctagccggtgctctcttttttacttacttgcatggaccgagtaccctaggggaatgggtagcttacggaggcatgtccttgatcttaacttgggtggcttatcgctacaagcggatcgagtatagcatttgccttcacatgaccttgaatgcgctggcttattattatccggtggtcatactcctttgtttattgccagtatggagagttttcttccatgataaattatgataaaatggtaggtaccaatgagttttgatgcagaaccatcctacagaaggtcagaaatccgtatggagagtagactcagaggtttagaacacttgttctagcctcttttgttcgcaatcatgctgtaggaaggaaatcaaaggagaacgaaaatgattgataataaatggctgagtggccaagggacccttctttgtgggatcttaaatgtcactccggattcattttctgatggcggtaagtatacgagtgtggatgcagccttgcaacaggcgagaaaactgatccaagaaggagctcagatcctcgatatcggaggagaatcaacaagaccaggtagtcattatgtagagatccaagaagagattgaccgcgtggttccagtaattaaagccattcggaaagaaagtgatgtcttgatctcagtggatacctggaagtcccaggtggcggcggcggcgctcgaagctggggctgatattgtcaacgatattacgggttttcttggagatcctaagatggctgctgtcgtcgcggagcatgaagcgagcgcagttctcatgtttaatccagtgatggcaagaccgcatcatccaagttccactatctttccaagttttggtttcgaaccagtcttttcagagcaagagcttcaacagatggctcaagaaccgattcaagacgtgatgtggaccttctttgaccgctcgcttgcggtagcgaaagcagccggtgtccagacggatcgtattatgttggatcctgggattggttttggtttgaccaagcgtgagaacttactcttattacaagaactcgggacgattcaccaaaaggggtatccgatctttctaggggtctcccgcaaacgatttgtggtcaatattattgaggaagctggatttgagacagatcctgcaacggagactggtttttggaatcgggacctggcttcgagccatttgaccagtattgcagccagtcaaggagtcgaagtggtgcgggtgcatgatattccccttcacaagatggcagccagtctgggccaagccattttccaagcccaagaggcagcagataccaatttaaaacaatacaagtaaatgaagacaaaagaacatcagttggatcttcgttggctagaagcctatcgttcccaagatccacatttcggtttggatcgcatggaagctctcttggctttgagaggaaatcctcacctagactgtcgggtcatccatattgcggggaccaatggcaaaggctctaccattgccaccttgtcccaactcttgaggcaggcaggtttacgagttggagtctttacctctccttatctgatccattacaatgaccaaatcaccattaatggcgaagccatttcggatcaagacctgcaaacctacctggatagttaccagcaactcctggaagctgaacaatcaagggctgtttttcaagggttgacggaatttgaagtgatgacggccatcgcctatgattattttgctcacgaggagctggattatgtgatcatggaagtcggtatggggggacgactagacagtaccaatgtctgtcagcctgttctgacggcgatcacttcgattggcttggatcatgtcgcccttcttgggccagatctggcttccatcgcccgtgaaaaggcaggcatcattaagccaggaattcctctggttctagggaaattagaagcagaagccagccaagtcattgaaggcattgcgattcagaagcaggcaccgataacagcctatgacagagattaccaagttgagctagaggcctcttgtctatcgggccaatccttttcttatcacagttccaaaagagaaacagcctcctatcaagtagcgctcttaggtcatcaccaggctagaaatgcagctcttgcgatcagtatctgtgatgtactttttgaaagagaagggcgtgaactcttgtcaagagagttagtggatgaggccttgcatcaagtcgtctggcctggccggatggaagtggtctcgcaaaatcccatgatcttactagatggggcccataacccccatgccgttgcgcctttgatcgcaagtcttcgggaactgttcccaagtcaaaataagaccattctttttacctgcatccggaccaaagccttagaagagatgctcattcagtggcaggaactagaaaatagtcgcttgatcctcacgagctttgaagatccaagagcttattctcaagaagagataagagctgctgcgaaaaaccatcagcttgaggaagtcaactggcaagagtttctacaaaactggcaagctgaaggcaatgagctcctcattgtaacggggtcgctctacttccttagccaggtacgaccttatttattaaaaacagaaaaatccaactaggagatgatatggatacaaagaaaattgaagaagcagtaaaaatgatcatcgaggcagtcggtgaagatgagaaccgtgagggacttcaggaaacgccgacccgcattgcaaagatgtaccaagaaatcttttcaggactagggcagacagcagaagagcacctgtctaaatcatttgaaatcattgataacaatatggtggttgagaaggatattttcttccattccatgtgtgagcatcactttttgccgttttatggaaaagtgcacattgcctacattccaaatggccgtgttgctgggctttcaaaactggctcgtacggtcgaagtttatgctaaaaaaccacagattcaggaacgtttgacggtagaaatcgcagatgccttgatggaatatcttggagcgcaaggtgcccttgtctgggtagaagcagaacatatgtgtatgaacatgcggggtgtccgtaaacctgggactgctacagtgacaactgctgcgcgtggattgcttgcgacagataaagacttgaaaaatgaagcctataaactcatgggccactaatggctggctataagaggtgaagagagtggatcaattacggatcaaggacttagaggtatacgcctatcatggtgtttttccagcagaaaaagaattaggacaacgctttgtcctagacctatgggtagattatgagatgacccgtgctgcccgcacaggagatttggatgcttcgatccattacgggatcttggcggaacagttgaccgagtggatgcaggcagaaaagatcgatctgattgaaacggttgcctttcaattggtgcaaaagattttcgaaagttatgcctttgtagaaaaagttcgtctggagttgaaaaaaccttgggctcctgttcccttgccactcgagacttgttcggtgacaatcgagcgagagaaaaaacgagcctttattggccttggtaccaatatgggagataaacaactgcagctagagacggcgctagaaaaaatcaaggatcgaggcattcaccttcttcaaacgtccacaaggattgaaacggaaccttggggaggagtggagcaggatacctttttgaatcaagtggcagaggttgaaacctggatgaccccagaggatttactagaaaccttacttgccattgagcaagaaatggggcgtgtccgtgagatcaagtgggggccacgtgtgatcgatctagatctgctctatatggaggacaccatttattacagtcctagcttgatcttgccgcatccgtatgtggcagaacgtgcctttgtattagaatctttaaatgaaattgctcctcattttgtggaccctgttcaaagaaagcccattcgccaattatgggatgccgtcaaataatctctcttctttgcttcataaaaaaacaatccctcgagcagggattgtttttgtttgtcttgctttatttacgatacaagcgatcgtactggtagacagggtccatggtgacgttgataccgagcttgcgaaggacgttcttgtcttcgtctgtcagcataacggttgaatgggcttcgctgcctttcaacttgcctaattcttgcatagcaagcttagcgtcttcgttgctcatagccgtaatggcaagggcaatgaggatctcgttcgagtgaagacgagggttgcgactacccaaatgattgatcttcaggccttggataggttggacgtattctggctcgattaatttggtttctttatcaatatgcgccaatttcttgatcgcattgatcaagagggctgcggttgggccaaagagatcagacgtttttccggttaccatctcgccgtttggcaattcaagcgccaaggcgggctcccctgtttcttcttctttttggcgggcaaggacggtcactttccgatcatttggagtaatccccaaatcattcatcaagagctcaattttcttcacagctccttcaccgacacgctctgctttgacatctaagatggtttggtagtagcgacggataatttcttgttgggaagcttcaatcgctgcgtcattgtccacaatggcaaagccaaccatattgacgcccatgtctgttggagaagcataaggtgaggttcctaggatgcgttccaacatgcgcttcaagacagggaagatttcaatatcgcggttgtagttgactgttgtttcgccgtaggtttggaggtggaagggatcgatcatattgacatcgtctagatctgcagtcgctgcttcataagccaagttgactgggtggtgcaaaggaagattccatactgggaaggtttcaaacttggcataacctgatttgatcccatttaattggtcatggtacatattggacatacaagttgccagcttaccagaaccaggtccaggagctgtcacaacgaccaaattgcggctagttttgatgtagtcatttttccccatcccttcaggagagatgatgtggtccatatcggtcggatagcccttgatcggatagtggagataagaggcgatcccgctcttgtccagttgtttgcgaaaggcatctgctgcagcttgtccagcatattgggtgatgacgacagagcctacaaagatccccaattcattgaatttgtcgatcaagcgtagcacttcttggtcataagaaattcctagatccccacgggcttttgagtgctcaatgttgttggcgttgatggcaatgacaatttccacctggtcgcgcaattcttggagcaacttgatcttattgtctggttcgtatccagggaggacacgagcagcgtggaagtcttctaacatcttaccaccaaattcaaggtagagcttgccatcgaattggttgatccgctcaataatgtggtcacgttgcaagttcaaatacttttcagaactaaaagcttgttttttcatgtaaaactcctgtatataagggaagggtctgcctcacaaatccaaggatgagtgttccgttccctaccatttcattctttcatattatatcagaaaacagatggaagataaaatattctaagatactttcctaagatgaggttagacatcatagaatttgattgttcaggcatattttttacataaaataacctaagtgatgctaaacaaataaaatgaggtagtctattaaggttatcgcagtgtgcacttaaactttccgctgtgagaaaagtgctagaaacaaacttgtttctagcacttgggagttttggacctaaggaaagtttttaagaggattttatcctctatctgaaagctccttacggggcttcagaaaggatttgcttaatagtgtttgatcagatcaactgtagaacgatccaatttcttaaccaatgcttgcaagaaggcttgcgcttgcaagaaatcatccatggcatagagggtttggtgagagtggatgtaacgtgcacagacaccaatagtggttgatgggaccccgccgttcttcaagtgtgctgcacctgcatcggtaccacctttggcacaatagtattggaatttgatgcccgcttcttcagcagtagtgagcaagaaatctttcatatttggtagcatgatgtgacctggatcgtagaagcgaagcagtgttccttccccaatcgcaccttggtctccaaagacatcagctgctggcgaacagtctacagcaaggaagatttcaggatcaaatttagtggttgaagtgtgagctccacgaagtcccacttcttcttgaacgttggcccctacgtacagttcattgtttaaggcttgtccagaaaggttcttggccaattcgctgaccatcaagacgccatagcggttatcccatgcttttgagatgacgtttttaccattagcagtgagaatcgcagagctatctgggaccaaggtatctccaggacggactccatagctttcagcttcggctttagagctaaagcctgcatcaaagacgatgtcgctaatggcaggtacggttggtccacctgttccacgtgtcaaatgaggaggaacagatcctgaaatagcagggtattcacgtccgtcacgtgtaaagagtttgaagcgttggctgctgacgaccatcggattccaacctccgattgggacaacgcggaaagttccgtcagctttgatttcgctaatcataaaaccaacttcatccatgtgagcagctactaagatacgaggagcatcggctgctgttgagtgtttgaccccaaagatcccaccgagaccatctgtcacgatttcgtccacatgaggggtcaattgttggcgcaaataatcccgtacaggagcttcatgacctgagatagcagggatttcagttacttctttgattttagaaaataaatcagtcataggttaccttctttctgatgctattttatcactttttctacaaggatggtagcgttattatggaaatcagactctaaaatcggagggagagatccagcttagaccgttgtccctctgcttattttgtgttacaataggcactatgaaagctaaaaaaattattttgtctagtctggctgtagcaagtgcaggagctcttgcggccggtgtctataaaattgccaaagatcaaaagcgtctccgtacccaagaagagttggtagcagaagtacgggagcaaatggaagccatggggacgattgcgactctgtatgtggaactctacgagtctagtgaagagcgcttagtaggtggtgtcatttttgaagatgagcgccattaccgctttgtctatgaggatggtctcttgcattacgaagaggaaaaactatgattacaccaaattctctagaagaaattgcttcttatatagagcaagaggacaagaaagtgtttgtcttttcagcagattggtgtggagattgtcgttacctcaagccttttttgccggagattgaagctgaaaatcccgaatttacctttatcttgattgaccgcgatgcctatatggatctggcgaaagtctgggatgtttatgggatcccaagtttggtggttctggaaaagaataaggaaatcggtcggtttgtcaatcgggatcggaaaaccaaagcgcagattacagcattcttagcaggattaaaataggagaaaaacatgattgtaacatacaacaaagaacaagtcggcgatgtcttgatgctgaccttgaaaaatagtggagaagcaaagctcgcggtggagagaaaaggaaaagtggctcgcgtttaccgtgaggacaaccaagaaaccgttgcctggaatatctttgatgcctcatctttcttcgccatcgaaggcaagggccaagtctttttgacagatgagcaagtggctcgtttgaaccaagaattggaaagagaaggcttcgaagaacgattggtcaacgatcgggaaccaaaatttgtggtcggagaaatccttgaaatggtggcccatccagatagtgaccacttgaatatctgccaagtagcagttggaccagataagacggttcagatcgtagcaggggctccaaatgcgcgagtgggtctaaagactattgttgctcttccaggtgccatgatgccggatggtagcttgattttcccaggggcccttcgtggagaaaaaagctatggcatgatgtgcagtccgcgcgaattgcacttgccaaatgctcctcaaaaacgaggcattattgaattggatgacgcagaagtagcagggacaccttttgatcctgctcgtcactggcacgaataaagagaagaatctaggatgttttgaatcctagattttttgattttactttgtcacctccattttttaaaattttttcgaataaatagataggaggtaaatgatgtataataaagttattttaatcggtcgcttagtagcggctccagaattgcataaaaccagcacagacaaatccgttgcccgagtgaccgttgcggtcaatcgtcgctacaaggaccaaaacggggagcgagagactgattttgtcaatgtcgttgtctgggggaaattggctgaaaccatggctagttatgctagcaaagggagcctgatctctttggatggagagattcggacgcgccgctacgagaaaaatggggtcatgcagtatgtgacagaggtcctctgccaaagttttcagttgctagagagccgcgctcagcgagcgatgcgtgaaaatggtggaacgggagatttagccgatatcatcttagaagaggaagatcttcctttttagaaataaaaaaagaaagctggttcgtttatagaccagctttttgatacttggtaggggtttcattcggggactactcttttaaaaataaagcaaaaagatgcatctgtacaataaaagccagcatttatcttgaaaaagtagtaaaataaagtaatatatattcaaaattttcagaaaaggaacggagtttgaaggggaaagaagaaagaaaagaacggttgaaatggctgataaaacgggttctactggtgattccagtggcctgcctcctcttgtggatctatgctgtttgtcaaaccagtagcatcaaggatcagaccaagattggtgtcacctatatgaccatgaacaatgagttctataaaagtattcattcggaaattagtcggattgccgatgagaaaggagctcttgtatctgtccgagatccagaattggacgaaaaaaggcagagccagcagatcgatgatttttgtgcccaaaaagtaaatgtgattgtgattaatccggtcaaaggggatagtcagcccattttaagggctcttaaaaaagctagaaaacaaggaattaagatcattgcagttgatacccagctcaagcattttaagccggatgccagcattgtctccgacaactaccaagccggagtcttgattgcgaaagagttgatgaaacgctcttcaaatgctcggatccttctcttggagcataaggggactgtttcggcagatacgcggattcagggatttaaggataccatcaaaggacatgggtcttatcagatcatctcggaactagaaaccaagggtcagacggagatcgccatgcccgctgtccgtaagtttttgcagtcaggggggaatgtcgatactctagtcgccttgaatgaccgttcagctataggagctttagcagcgatcaaggagcaaggaatcacccatcccattgcgatctatgggattgatggctcaccagatatgaaagccttgctacactcgacagatgatgtcgtaggaaccgttgcccagtctcctttgaagatgggagatcgcgtgatggaggtcatccaagatatggctgatgggaagagctaccaaaaagaaataaccattccggttcaaatgatgacaaaggaaaacatcgatcaatttgatgtgaatgggtggcagtaatgagaaaatttagaggtgtgaggtacagtttggccattctgatggtcgtgaattttatcgctgtgatgctcaacagtatcatctatcttcaagcaaccaactatatcattgcccaacgacaagcttccctattagtagaacgcttagagcgcattccttttgcgccctctacaactttttggttgtctgcgctcttatttgctggaattgccttgatctccatgagtcgttaccggtctcaaacgagtcgatggtccatttttgataagtggaacattctggagatcctcctgatgttgctcttgatgtgggtccaaaatgtagcttataacgggcttattctattggtttttgcggatatcttctatggttccaaagagttgaataccaagcgagaccgcaggtattggtttgcgtttatcctagtgagtttcttgattctacttgtgaccaattcagacgtcttttcgcttttctttccgataccttctctggatgtctatattcatttttatcctgcctccattcggattctggcctttttcttaaagaattccctctatgccttgaatatggtgctcttcattatttcgcttttgttctatattatgaatgttcttgcggaaaaccacgaagtggaagaagagttggccatggtttcgaaggtcaatacggagttgaacaactatatggccttgtctgagaagattgcagaagatcgggagcgcaagcggattgctcgggagattcacgataccttgggacacgcgctaacagggatctcggcaggtttagatgctgtcggagtcttgattgatatcgatcccaatcgggcaaaagagcaggtaaaaagcgtatcagaagtggttcgtgaaggaatccaggatgtgaggggctctctcaaccgcctccgtccaggtgcccttgagggacgaaccctcaaagatgcattagaaaagatgatccgcgagtaccagacgctttccaacttgcaggttgatttacactatgaatgggtcgatgttgatatggacgtcatgattgaagatacgatctttcgtgtgatccaagagtctatgaccaatgcggttcgccacggtcatgccagtcgattgagccttcatttttttgaggatgaagaagattacctgatcgagttgcaggacaatggggttgggtttgaaaccttgacctatggctatgggctcaagcagatgatggagcgcatttccatcctaggaggacagcttcaatttgaaagtcgcgatggatttttcacgcgcgtcagtttaccgaaatataaagaagggagatagagatggtgataaaagtaatggtggcagatgaccaggccttgattcgagaatctctgaaaattattttgtcagcccaccccgatatcgaagtggtggccacagtggaagatgggaatcatgtcttgtcgagcattccacagacacatcctgacctgatcttaatggatattcggatgccaggcatggatggggttttggcgacaaaagaagtcaaagagcactatccggatatcaaaattattattttaacgacctttgatgatgatgaatttatctatagtgcgctcaagtatggtgcttcaggttatcttttaaagggagcctcgacagaggaactctatgaagcgattaaggtggtgcatcaaggcggagccatgatcaacccgaatatcgctagtaaagtctttcaaattttctcacaaatggccaaaaccaacttctctattgctgtagatgaggacaatgtcaaggatttgagcacgacggaatggcgcattattcaagaagtcggctatggggagtctaataaagaaattgcggctaaacttttcttatcagaaggaaccgtgcgcaattacttatcaacaattttggcgaaattaaacctacgagatcgaacgcaattagcgatctggtcagtccaaacaggagtgacgagacgtgatttttctaaaggaaatacagaatgaaattgaagcgaaagcatctttgttgggggatcggcctccttgttgtgctctgtgcgagcgcgggtttctattggtggaaacagcaaccgaccgtcctccatatcggcgtttatgcaggttctagctgggatgtgccgaccagtcaacgttcccatgccttggatcgtgcgattcaaaaatttgaaaaatcccatccccacgttcgtgtagagtatgaaaatgggattcctcagtcggattattctgactggctttccgaaaagattgtctcaggaaagacgccagatgtgtttatggtctctgagcaagatctttccttattagcagcgcgaggcgtattagaaaagttaaacggctatatggatcgaaaagatcaagctgccttttatcccgttgcctttgaatccggtgtctatcaggggcaaacctatgccttaccttatgaaagcaatccgattttgatgtgtgtcaataaagatctcttggataaagaaggtatcgcggttcccaaagaaggctggacccttgaagagttctatacgatttgcaagaaactaaccaaagataccaatggggatgggcaattggaccaatttgggagtacagaatacacctggaaagaagccttggcggcaaatggaggtcatctcttccaaggaggcatgctcaagctgacagctccagaagtcaaagaatctttgacttttctgcaaaaattggaagatctaaataaaaattacaaggtgagctctaaagattttgaccaggggaaagtcgccttctatcccatgaccttggcccaatatcggacctataaaccttatccctaccacgtttcaaaatattcaaacttcacctggacctgtatcccgatgcctgctaagtcaaaaacgaccaaggcaaccttagtcacgacgacttcttttgctatgtcagctcggagttctcattccaagttggcttgggaattgatgcaactcttaacagaggatcccgaaattcaacaaaccctctttgcccaatcccaggggatctctgtcatgccacaggtcgtcaagagtcgctctagtaaagaccttttgcaggtagatgattttgggacggattccttgaccaatcagaccttgaaccgcatcatggaacaagctgttgaaagtagtcctaaaaatgtctcaaaagaggtgttagaaaagttagattacttgattggcaatgccttgcgcgatcaagatgttgagaaccgcttgcctcaaattcagagggagattgaaagtagtctacaggtaggagtttagagtaaaataagatggcattttgtcaagtgacagatgtcatttttttattgctaaatgtcatattgggaatgtgacatttgacaatataaaaacgctttcaaatagtctacaatagagtcaaataaaggaggcgtagaaaaatgaaatacctcgttttggtcagtcatggtggactggcagaaggtctaaaaacatcactagccatgtttgctggtgataagatggatcaggtcatcgcagttggactcaaagaaggaaaatcagttgatgacttcgcagttgatttcagagagagcatttcaggattgacagctgatgattctgttttggtcttggcagatatcgtaggtggtagtccattaaccactgcagccacggttctagaagaagctggaaagctcgatggagccttaatccttggtgggatgaacctcaccatggccttgacggcagttgtgatgaaggatgtgttggatggagacgatttgtcagccaccatcttatcagaagcacgatctgcactacagccttttgaagtttcagccactggtgctgaagaagatgatgacgatatttaatagggaggtaccttatggtagtaacatttgtacggattgatgaccgcatgattcacggtcagacagtcacacgctgggcaaaggaaaaaccatgtgatggtttgattgccgtaaatgatgcagcagcatcaaacaaggttttgatccaagcttacaaaggcgcatcagacaagaaaacctttgtatggacaaaggaagcttttaaagaaaaatcagcaaaagtaacagaatcagatagtcgttacttcttgattaccaaaaatccaatcgatatgaaggaaattttggtcgaccaagggtttgtcccaggtgatgttaaagaaatcattgttggccctgcaaatgatcgtcctggagctgtaaaattgggaaataaccaatccatcactcaggaagaagcagaagccttccaagccattcaagcagcaggctacaaggtgaaattccaattgttgccagatgtttccatcgggtattgggatgatttcaaatcaaaatttggtttttaaaactaacagtctgatctgttaggtaaataaatttacaaacaaaaggagcgtttgttatgacaatttcatggattcaagcaatcttgcttggtattttcgccagcttgtcttcaatgcctggtatgggaggttccagtatcgggaactatacactcggtcgtcctttgatcggtgggttgatttcaggtttaattcttggagatgtgacaaccggtattatggtcggggttgcccttcaagtcgtttatatcgccttggtaacacctggtggtaccgtatctgccgatgtgcgtgccatctcttacatcggtgttcctcttgctatcttgtttgtgcatgctaataacatcacagatgaagcaggaatcgccgcagctgcagctccaatcggtgcagccgttgggacaattggtacagttcttttctacggtaccgctactatgaacttggtttggcaacacattggttggaaagccgttgaagaaggaaacttcaaaaaactctacgcagttgactgggtttacccttggatctctcacttcctcttctctttccttccaacaatgattatcaccaaatacggtgaaaacatggttgatttgatgaaacaataccttcctatggatggttactggatgaaagccctctttacagtcggtgctcttctcccatgtgtcggtattgccatcttgttgaaacaaattgttacagaagcaactgacttcattccattctttgttggatttaccttggcaaaatctctcggattgaacttggtatccagtgccgttgtttcattaatctttgcagtaatctactatgaacttgaagtgatcaaatcgatgaaagctgctccagccggagtggtggaccaagacgatgatgaggaggatatttaaaatggctgatagaaagaaaatttcaaagaaaacattagcaaaagcattccatcattggtattatggtcatttgacttgtttctctcaagaacatatgcaaaccttcgggtacttgacttctatgcttccaatcgtagaagaaatgtatgacacaaaagaagaacaaaaggatgctatgcaaacctatacggccttcttcaacactgaaccacaacttggatctcttgttgtagggatcacagctggtttggaagaagcgcgtgcaaacggagatgcagtagatggcgaaaccatcaacggtatgcgtgccggtttgatgggaccaatcgctggtattggtgactcattggtcgttggtaccttgattccagttctcttagggattgcccttggtctttctaaaggtggtaacgtcgctggtgctctcttctacatcgtcgtatggaacctcttagtctactttggtatgcgctttgccttcttcaaaggttaccaattaggggataaagccgttgaattccttgtaggaccaaaaggacaagctcttcgtaaagcgatcagcgttgtcggtggtatggttatcggtgccgtagcagctacttgggtatctgttacaacagcccttcaattcaagaattctgaaggaaaagtcttcttgaacatccaagaaaagatcgatggtgtttatccaggtctcttgacagcagccttcatcactctttgctggtggttgatgtctaagaaaaaaatttcaccaaacaaagtcatgttacttctcgttgtagtggctttgatcggtgttgcccttggtatctttgacccacatcttaaatactaaggtcaagaaaaaacgaatttgctagtaggagtttttgagaatgaagtgaatggacctcctttatttgcacttcattctcaatttttatcaggaggaatcccatggttacaaaacaagaacttgtcaatggatatgaaacagaaatcaagtaccaacgccacatgcttgaaaaccttggtcgttggttcagcttactctttatcattgccagtattggtgtggtattgatctatctctttcacaaaagtttcctcccactcttgatcctcgggattttactagccttggttggaattttaggcatgattgtttttggatatggcatctaccgcggtcggatcaatcttcaaaaagtgatcgatgatttcaatcaaaaattgacaattttaaattgatattttagaaacatctcatttatttttgaggtgtttttttcttgactatttctgaccaagtgatacaatagaaacataagttagcacttgtgtatagagagtgctaaaaacacgtatggaggaatgaacatgttaaaaccattaggagaccgtgtggtcttaaaagtagaagaaaaagaacagactgttggaggttttgtcctcgcaggtgcgagcaaggccgatacaaaaacagctgaagtagtggccgttggtgaaggtgtgcgtaccctaagtggcgaactcatcgctccagctgtaaaagcaggagaccacgttttggttgaaagccatgcaggaattgaagttaaagatggggaagaaacctacaccatcgttggaacagcaaacattcttgcaattgtagagtaagagaagaaagaggtaagagaaatggcaaaagatattaaattttcatctgatgcacgttctgcaatggtccgtggtgtcgatgtcttagcagatacagtgaaagttacgttgggccctaaaggtcgcaatgtggttcttgaaaaatcatttggttcacctttgatcacaaatgatggggtgaccatcgcaaaagaaatcgaattggaagaccattttgaaaatatgggtgccaaattggtgtcagaagtggcttctaagaccaatgatatcgcaggtgacggtacaacgaccgcaacggtcttgactcaggccatcgtccgtgaagggatcaaaaacgtcactgcaggagctaacccaattggcattcgtcgtgggattgagaccgctgttgcaacagcagtagaagctttgaaaaacaatgcgatcccagtatcgagcaaggaagccattgctcaagtagctgctgtgtcttctcgttctgaaaaagtcggtgagtacatctctgaagccatggaaaaagttggcaaagatggggtcatcaccattgaagagtctcgtggaatggaaacagaactggaagtcgttgaaggtatgcagtttgaccgtggttacctctcacaatacatggtcacagataatgaaaaaatggtggcagaccttgaaaatccatacattttgatcactgataagaagatttcaaatatccaagaaatcttgccattgttggaaagcattcttcaaagcaaccgtccactcttgatcatcgcagatgatgtcgatggcgaagctcttccaacacttgtcttgaacaagatccgcggtacctttaatgtcgtagctgtcaaggcaccaggatttggtgatcgccgcaaagccatgctagaagacattgccatcttgactggtggtacagtcattacagacgatcttggtttggaattgaaagatgcaaccattgaagcacttggtcaagcagctaaagtgtcagtcgataaagacagtactgtcattgtcgaaggttctggtaacccagaagcgatcgctaaccgtgttgcggttatcaagtcacaaatcgaaaccacaacctctgaatttgaccgtgaaaaattacaagaacgtttggctaaattgtctggtggtgttgccgtaatcaaggtcggtgctgcaacagaaacagaattgaaagaaatgaaactccgtatcgaagatgcccttaatgcgactcgcgcagccgttgaagaagggatcgttgccggaggtggtacagctcttgtcaatgtcatctctgcagtcgcagcccttgaattagaaggagatgaagcgaccggacgcaatatcgttcttcgtgccttggaagagccggtgcgccaaattgcccacaatgccggttacgaaggatctattgtgattgatcgcttgaaaaatgccgaagtcggaacaggtttcaatgctgcaacaggtgaatgggtgaatatgattgatgcaggaatcatcgacccagtgaaggtgagccgttcagcccttcaaaacgccgcttccgtagcgagtctgatcttgacgaccgaagcagtcgtagccaacaaaccagaaccagcagccccagcaggaccaggaatggatccaagcatgatgggtgggatgatgtaacctgataccaatgattggtgctaaagcaccgaatcattggacggtagccgctatgttgcggcctacctaatcatcttactagctcaaagggaggaaaatatcgttcctcccttttcacgtcgtaaccccttggttaatttatcaggtgcatttattgttatggcaagcaccatggtgccttgccgaagtgtcttactagctcaaagggaggaaagtatcgttcctccctttttcgcgtcgtaaccgctacaaatgattgaggctatgactctcatcatttgacgccagccgctattgtgcggtctggctaatcgtcttactagctcaaagagagtgggacataaatcggtaattcgttagaattcgatttcgtcgtcccacctccgcacagttgagtagggctgtaaaaactgataaaatcagcgtagtagagcccactcaaccactgcgtcttgctcgacaattcaaaaataattgagaggctaggacttttgtcccagcctctttttatcgtgctttggaattttcatgtgttgtggaataatatttttattttaaattttgtaacagaaatgataaatactaattaaagaggacttgcgtagatgcttgggaatccggtatttgcggggttttcgggcggaggaatatttgccaacaaattgcaatacaaattaactgattttgtaataattctagtgtatactagtaagagtagatcacaggtctacattgttgcaaggggagaacttcccacatacatgtctattgacaataaaacttgatcgtaatatcgctgctagtaaaatgagagtttgaacatagcgtagattttatcgacctttttcatattaaaaaatatttttcaaattccccttgcgcaagctcttccggattcctccgggagagtttttttgttaagaaaaaaagtagaaggcctttgagtctcctttgaaagagtggcttagcaggcatcatttatggtaaaatagaacatattcgtagaggggaaggagtgaggactttgttgaagatttttgtgttagaagatgaatggatccaacaatcgcgtatcgaagcggtcttgcaggatctcatctgtcaaaaatccttgcaatgcaaagcgccagaagtgtttgggaagtcaagtcagttgctggatgctatcacagagagaggcgcccatcacctattctttttagatatcgagattaaaggtgaggagaaaaaaggactggagatcgcaaaagagattcgtaagaaagatccccatgcgaccattgtctttgtcaccactcactctgaattcatgcccattacctttcagtacaaagtagctgccttggattttatcgataaaacgctgggtgaggaagagttcaaagagagaatcagctcagccatcgattataccttggagcaagctgggaccacgattgcgcaagatgcctttacgtttgagagtgcgatggcgcgtgtacaagttccttttaataagattttgtatgttgaaacgtctccaaccattcacaaggtcattttacacacccaggaagagcgcttggaattttacgctagtattaccgatatcgaaaaagcagatccccgcttgtatcggtgccaccgctcctttgtggtgaatccgcaaaatattacgaagattgataaagaagccaagaaagctttttttgaaaatggagacaattgcttgatctcacggaccaagtatagaggcttactggaagctttgaaaaaatagagggagaaagaattgctgttaactattctaatgtcttacctaaagttcttcgtcagcatgctgatctatcgtcatatcagtagacaagagttcaccttgtgctggctctttttgtgccccttcttctttgcaattatctttacccttgtgccaccggtaggcttttttggctatttcttagtatttattgcctatagtttctaccgaaatcgtaacatacgacaccttttgaatattttttacgggctctacccggttgtcatggagagtctcattgcgcgtctcttagccttttatgtctttccaatgttagggatcgtacttgttcatgaggcatctgtcagctggtatgatgctctacttgaattgctggtctttcctgtttatataggaatcactaaattgttaaaactagattttacagatttaaaagtagggtttcaacggcagtattttaatcgtttcttactcccgatggatctttccatgtttgtgtatttagtcagtgttgtaggtctggtggtttttgaggatgctattcctcatgcagatgctttacgggaacagttaaatagtatttatttgattttgttttttgtgatgctcttgtatttcaatgcggtatccaaagaacgattgaaacaagaaattctggaacaaaaagataggcaactgcaggagttagccacctatagccaacacgtcgaaatgctctatggggagattcgtgcctttcgtcatgattacctgaatattttaaccagtctcaaattaagtattgagcacgaagacctcaatgcgatcagggaagtctatgagaatgttcttcgagagagtggccagcaattttacaatagtaagtttgatattgccaaactcagtcacatcgaaaatccagctgtaaaaagtgttctgtccgcaaaattattggaagctcaaaataaagggattgggatctctgtcgagatcgatgaaccagttcgtgatttattcatcgaggttttagatttcatcaccttcttatccatcctttgtgacaatgctatcgaagcgagtctcgaatcagaggacccacagctgactcttgccatgcttcaggatacgaactccctcatcttaatagttgaaaatagtacaaaagctgaaaaaatagagttagcgagaatttttgaaaaagactactcgagtaaaggagagggccgcggtcttggcttgtacaagatccaacaattactggaaaagtatcccaaaacgacagtgtctaccaagagttcaaactaccgatttactcagagcctgaccttttggaaggaataatggaatagagagtgggacagaaatcggtcattcgttagaattcgatttcgtcgtcccacctccgcacagttgagtagggctgtaaaagctaatgaaatcagcgtagtagagcccactcaaccactgcgtcttgctcgacaatcaaaaataattgagaggctaggacttttgtcccagcctcttttttgaccattcacgacgattttctgaccgattctgacagagagctacaaagactgtccctttgaagtatactgtatacaagatcaataagaaaagagggatcgtatgtttcaggtagcatctattacaaaatcatttaaggagaaagctgtattaaagggagtgtctttttcgatagaagaaggagacaaaattgccttgctgggaaataatggggcaggtaaaagcaccctgttcaatattatcgctggacagctccaggccgattcggggacgataaagacttcgcttgattttcaaagagaaattgggatgatgcctcagggggatctgctcatcgaggatctaacccttgctgaattcgtcgaattaaaaagccggatgaatcagctgaagcaggctgatatcaatggactcttagaaatggtcgaattaagagaatcaagagagcagatggtgggaagtctttccggtggtcaaaagagacgcttgtccttgttgttaactattttgaatcatccaaagttgatttttttagatgagccaacgactggcatggacttggaagcagtggataacttttggaaactactggagcagcaagagtttacatctgttgtggtgacccatgatttcaaccaaattgatgccttttttacaaaagttttgattttaaaagatggtcgaattgctgccgcaaaagctgttgaggacattcaccaggctggtcaaaccattgagcagtatttccgagaagagatgaataaaggaggggaacaagcatgagaaagattcaattaaaacaagttttacgaaataagcgctttgtattattcaccattattttacccataggctggtatatcttcttttatcagcttcaaaaaggggtttcgccaagtattttattaggcattgccgtatttatcggggtcattggcaatagccttgcaacctttagtaagcgtatcgcctcagatatcggcttttattcttttgaatcccactttacaagctatagtgtcaagaactatttatgggatcaatcgatcgtacaactgattttgaacagcttgatctttttagcagtactagtagttgctgttctaggttttcactttccagtgacgactagcctgttggtgcaatttttcctcttatccttgatggggatctactttagcgtgattggctttgttcttggggtaagagtagatgccaagacgattgataccattggctttcctgtcattattttggccgctatgaccattattccctttgatacgcttggcgcaagtggaggatttatggacttggttggcaagctacaacgggctttcccaggctattattatacaaagctgatccaagatttgactgagaaacaaacgatcgatgtctctcaattggcgctctttgttgccgtatttggattgaatttgctatttttctatctgctcgtacccaaaggaaaaatggggaactaagagcagttaaaaagaggctgggacaaaagtcctagcctctcaattgtttttggattgtcgagcaagacgcagtggttgagtgggctctactacgctgatttcatcagcttttacagccctactcaactgtgcggaggtgggacgacgaaatcgaattctaacgaattaccgatttctgtcccactctcttttctttgctataaaacggttattcggtattcgtccgtcaagtacttggataggttttgccaatcttcttccttaaatttacaaagattgacgaagagttttacggtatggtgctctgtatcaatgatggtattggattttgagagattttctagtgtagtattgtccctcagttgaaagtcgatgaaataactcttactattttggtgatccgggtcactgacatcaaccactttataggctgcactcagcaaatcttccttgggaataaagatatcttttgtcagaatcactccctgataagcatggatcccatcagaagtcagctcaaaggcgatctgacgactggtcagtcttttgatcccagcaatggttgcatagatcgcaatcaacaataaaaggatctgaatgagagtgataaaagtgatttttggaaacccctcaaaacctaggatcgataaaaaagctaagtggataaagagcgcacaggcaaaagccagagagccatatccgacatattttgaataatagattttcattttggactccttacatttaagatgcaacgaaaacttggaatttcaagtacccttatcatagcggattcgatgaagagctgtcaaatgtttgctagggttcaaaggtgcttttttattttaaatggaataacaatgatgcaggatattctatcttcgtacgctacattatagtgtataaaaatatgagccaaatacttttgagacaagcaaaaaagccttggttttcaaggctttttgtgcataaaaaatgccccctacatggatttgtaagaacttttcatattgaaaataaacaaaaatattgaaatatagctgattttaggaaatacttttaggtattttcaatgtcaggatttaaaaatggggcaaaagtggggaaaaacgaatgactcgcatttggtttgaaaatctataatacctaatgattatgctatactagatatatagtgttgttataaataaatgtcggcgtgagaacaaatcggaggataaaatggaaaaacaaattaatgaaaaaattcgtgagattgcacagagtgttaatgagacaataccagtagcatgggataatctttttattaacataagtttagcttttgatggaggagaggtatattatttctttaatgaagaggggaaaaatgagtatatctacaatctatatattccaaagcggtatggtattcctaatttagagtttcggaatcaagaaagacgcacctttagattagcttgggagttgagagaaatttttgagaaagaaggccaacctttgtggacttcttgtactataaaagtaattagcacgaaattatctgctgaatttgactatgcaccttggaatgaaagtgattatagttcaggtcaacaaatggacttttttgaatataaatatctcggcaagcaaccagcgaatgaaaaagagcttgagcagttcaaggccatggaagctttccaaagagagcataatgggaaatagctatatctaaagaacaacccacctcggaggataaaatggttcaacagatgaatgataaaattgcatttttaaatcgatacacgttgtcatctaaaaataaagtagaatttataactgataaatcaacgattttaaatgcaccgattccagaatattggaaagcggcatttctagccgatactttggaagaatacttggagcaattctacgcagaatggaatgcgaaaaagtgataattaaagagacaaaaaagctgagaatatgatttcccagcttttttgaatgcgatagaaatagcaactagactatttacgaaagacctcaataatgtaggtgaagccagtaactaaaaatgcaaaggcaatgacataaacgacaaagacacctgtagccactggattgaacagaatcactagacctagtaaaaattcaagcaaggctacccacatgatattgctaccaataatagggaaaatcaatcctagacgattgcctttaaagaaagcaataatggcttctacaattaaccaaattcctacaatggtcggaatgacgaccggcagggtcacaaagccataagcaacgaggtaaagagctaagagaagactaacaaatccttggaaaagataaacaggtgagcgaagctcttttggtgcagagaaatagcctaaaatagctgctatagaagaaaccagtaaaccaaatgaaatccaccagctgtaagcaacaagattagctactgggtttgtaaataggaaaagtcctaaaaggacaaaaacaactcctgcaaggaatagcagtaaacgattagaaaatttcatttcaataccccctatatagtatagtttgctaataaaactattgtacttatttttatagaaaatgtcaataaaataaataaacaatttggaagtttcagtctgacttacaaaaagaaaaggagttttcactccttttcacagattgaagacaaagtccttataaaagtgtcttctaaagattttaacttcaatctgaagcgaggttatcctcgctttttctatttatcaaacaattccttattttcaattaagagttctagtggagatttatcccttgcttcaataaaaccaggttcatattggttatgaagtgttcttttctgagaagttggatcaatatacaactcatctccatcttctgtgtatagttggttgcctcttgttaagtaaagtaaatcctctaagtactgtccatcagtttctagaaaatcttcgatgtatttgacagcttttaaaatctcacttactttatcagagtattcattagattcaagaatactcttttctaactcaatctctttactagttccaaatagttgggttggagttgcattaaaatattctgctatcttatccaaatttgcaaaggtaggatagcttttttgtttttcgtaatcagagatgtctggaaagattgctcataaaaaaatgtggggcaaatgatggggcaaatcagttatagacaagcaaaaaagccttgtaactcaaggctttttcctgttgatttagatgccccctacagggctcgaacctgtgacccatagattaagagtctactgctctaccaactgagctaaggaggcaaatataaaaagctgtattggtgccgaaacttcacgatttgtattgaacccgcgcaattaagcaggtgggcaactcgctctgacttagctgcttccgcgtgaaacggcctgcatactgccagaagtcttttgtttccctaataatacaaaaaatagtcggtcaacacttaagtgtgagttcgtacaccacagcgtttctatatgtatatgataccacattttgaaaatatttcaagggaaaatctcaattttttgaaaccgatgtcactttttcttaaattgatcaatcttctccttggtggctccgagagcacgctcgtacttgccattttcattgggaataaagtaggaggcgtgtttgagcttgtctggcaggtagtcctgattgacccagttgccagggtagttgtgaggatatttatagttttgcgcatttcccagttccttgcttccggcgtaatgaccatcgcggaggtggcgaggaataggaaggttgccagaacttctaagatcagccagcgccttgtccatggcaacgtaggctgagttggatttaggcgaaagggctagatcgatgacgatgttggcgatgagaatgcgagcctcaggaaagccgatgcgctcagctgcttgaagggctgttaccgtatgaatctgcgcatctggattggccagaccgatatcctcataagcgatgacagtcaagcgacgagcgaggctgggcagatctccggcttcgatcaaacgagcggcgtagtggagactagcatcgacatccgaaccacggatagatttttgcagagcagagagcacgtcgtagtggccgtctccatctttgtccatggtaatgtagctgcgctggaggctgttttccatgatctctagcgtaatatggcgaatcccttctgcattttcagaggtcgacagcaccgctagatcgagagaattaaaggcagagcgaagatctccattggtcgaggtagcgatgaaatccaaagcatcctcgtcaagcacgacaggaaagtcaaagccacgctcggggtcatctagcgctgtcttcagtgcctgtttgacctcctccgttgttagaggctccagctcaaagatttgtacgcggctacgaatagcgggtgtgactgagaaaaagggattttcagtcgttgcaccgatcatgatgactagaccactttcgagcaatggcaggagaaaatcttgcttggttttatcgaggcgatggatctcgtccaaaagcaggaccaagccaccagaaaatttagcttcttctgcgatttcttggaggcgttttttactgtcaaccgttgcattaaaagtccgaaaggcatacttagtcgttcctgcgatcgcagaagcaatactggtctttccgatccccggaggtccatagagaatcatagaggacagacgattggcctcgaccatgcgacgaatgattttgccttctccgaccagatgctgttgaccgatgacttgatcgatcgttcgtggtcgcatacggagtgcgagattgtcgggcatttccttctcctttctagctttgtctcctttcaaagaggcgttttttatggtaagattgtagtaactattgtaacatattccgctctaagagtgggaaattagaaagaggacgctatgtctaaatacggatttttggatgttttagaagaggagatggacaaggtttttccctttgattttgagatcaattgggataagaaaaaccatgcggtagaagtggcttttctcttggaagcacagaatacgggaggggttgcactagttgatgaagctggggaagagtctgatgaggatatcttctttgaagaagctgttatcttctacaatccagccaagtcgcatgtggaggaagatgcctatttaacggcgattccttatgagcctaaaaaaggcttgtcacgtgaatttctagcttattttgcgactttccttcgagatacagccgagctagccttggatgagctcatggatttcttagcagacgaagaggcagagagctttgagatcatctggaaccaagaagtttttgaagaaggcaaggttggcctagaagaaagcaccttttatccctatccgcgatattagaaaagattctaagtggacatttttaaataatgaattcaaggagaagggggagactatgctagaaaaagtcaaacagtttttcaggagaaggtcagctaaaactgagccgtcagttgatattcttccccgcaatcgctttgcggatctagatttcgagcgaatattgaagtctggaactcgtcgccttgtcgatgaggaggggcgctatgcagaagatggtacagtcacagaacttgaatttcctgaagactttgtggaatttgaatttctagttggttttaagacggaggaagaagagcagtttcaacaactattagctcgtttaaatagtattgacaatgccattcagtcttgtttggaaagtgagatgcaacaacccatccctcagtttgccaaggatttgggctatactcagaagaggtgggagaaaactttttacttccatccttgggtattaagttttgaggaaaatccgcctaatcttcgctatgttgcagattatgtaaatgatgagtttacggtttattttgctaacaaacatggtagatggcaggcgtactgggatgcagagtgccaaaaagtaatcgaagaaagctagctcgtattttcctagagagtaattgttatcatagaaaagagtaaatatcatggaattattagatagcagaatggatttccaaggttgcaagattgccttgatttgtggggataaggtcttgactatcttacgtgatgacaaggacgatatcccttgtcccaacatgtgggagttgccaggtggtggccgcgaaggggatgaaaatccctttgaatgcgcagcgcgtgaagttcatgaagaactgggaattcatttaaatgaagattgtttgctttggggaaaaatttatcctagcgtaatctttgaaggcaagcaatcggtctttatggttggtcagctaagacaagaacaatttgacaatattacctttggagatgaagggcagggctataaattgatgaacattgaggagtttttgaagtctaaacaggcagtgcctcagctacaggggagattgagggattatttggaggaaagtttatgataacacttgttcgagcgggagcagaggatttagaaactattattgcaattcagagagccagctttaaggctgtttatgaaaaataccatgatgaatatgacccttatctcgaggaccgcgaacgaattaagtggaaattagtggagcgtcccaatagctattactactttgtaaaagaagatgaagaaaacatcggatttttacgagttcagaccaatgccgagttaacgaaagcttggttgggaacggcagcgattttgcctccgtatcagggaaaagggtatggatctgaaggattacgcttgctagaagaggaattttcaaccgttagacaatgggatttgtgtacggtattacaggatgcaggcatggtcgccttctacgagaagaatggctaccaacaaacccatatcgaacctgaaaaagaaggcatggatatggtctacatgaaaaaattgatagagaaatagaaaggatggttcggttaaatttctaaactgaacccgccctaaacactgtgccaaaaagataaacttctcttagatacaaacgtcttcagagaatttcctattttggctttgtgttttacgggcttggtatcttaatgatggaaacatggcaagagttaaaagttacagtcaagcgtgagggagaggaattagtttccaatctcttgattgagttaggtgcccaaggggtagcaattgaagatagcatggactatgtgggaaatgtggaccgcttcggtgagattttccctgaggtcgagcaacaggaagaaatcgtggtgactgcttactatcccgaaacggttgatgtagtagctgttgaaacggatttgcaggatcgtctctcagaattgacagactttatggacttaggagaaatcaagattggcacgactgccttggctgaggaagactgggccgacaactggaagaaatactatgaaccagctcgcatcactcatgacttgacaattgtgccgtcatggacggactatgaggcgactgcgggagaaaagattatcaagttagatccaggtatggcctttggaactgggacccacccaacaaccaagatgagtctttttgccttggagcaggttcttcgtggtggcgaaacagtgctggatgtggggacaggttcaggcgtcctttctattgctagctcacttctaggtgccaaggaaatcttcgcctatgacttggatgatgtagcggttcgagttgctcaggagaatattgaactcaaccctggcatggaaaatatccatgtagccccaggtgatttgctcaaaggtgtggagattgaggcagatgtcatcgtagccaatatcttggcggatatcctaattcatttgacagacgatgcttatcgtttggtcaaggatgaaggttacctgatcatgagtggcattatcaaggacaagtgggacatggtgcgtgagtcggctgagtcagctggatttttccttgaaacccacatgatccaaggggaatggaatgcctgcgtcttcaagaagaccaaggatgtctccggtgtgattggaggctagcatgcagcagtattttgtaaaaggtttggctagctcacctatcactatcgaggacaaggaaaccagcaagcacatgtttcaggtcatgcgcgtgaaagaagaggatgaagtgaccttggtctttgatgatgggattaagcgattggcgcgcgtggtcaatgtggaaagccgtcagttagagttagttgaggaattggatgacaatgtggaactgccagtccaagtgaccatcgcatcaggctttcctaagggagacaagctggagtttatcactcagaaagtaacagaactcggtgctagccatatctgggccttccccgcagactggtcagtcgctaagtgggatggcaaaaaattaggcaagaaggtcgaaaagttagaaaaaatcgcccttggagcagccgagcaaagcaagcggaatctggtaccaagcatcagtctctttgagaaaaaggcagactttctggctcagttcgaccagtttgaccagattgtggtggcctatgaagagtctgctaaagaaggagaggcagccactctgattcagtcgctgaccggattagaagctggaagcaaattgctctttatctttgggccagagggaggcctctcccctgcagaaattgaaagctttacagctaaaggagcagtgttagcaggacttggacctcgcatcctgcgagcagaaacagccccactctacgctcttagcgcagtgagtgttgttacagaattaatgaactaacgaagtgaaggaatcgcttcgttaatttttttacaaaagacttttacgaatgatgaaaagcaaggtggatcccagaatgatcttcgagaagtatccgtatattaaagtagcttcattggttcccatctgcttctaaaagtgttaaaatagtatccaagaaactggagaaaatacatgccgaaagaagagaatttaacaggggaccaagtcgttgcccttacaaaaaaatatttatcacctgaagatgttgcttttgtacaaaaggctttggtctatgcggttgattgccataatgggcaattccgtcagtctggcgagccttatatcatccacccaattcaagtagcagggatccttgccaagctgaaactggatgctgtgacggtcgcctgcggctttttgcatgatgtcgtggaagatacggatgcgactttagatgatttagagcgcgaatttggtcatgatgtgcgcgtgattgtcgatggggtgaccaagctcgggaaggtcaagtacaagtcccatgaagagcagttggcggaaaaccatcgcaagatgctcatggccatgtctcaagatattcgtgtcattttggtcaaattggcagaccgcttgcataatatgcgtaccctcaagcatttgcgcaaggataagcaagagcgcatttcgcgtgagaccatggagatctatgcgccactcgcccaccgtctcgggatttccagcgtcaagtgggagcttgaggatttgtccttccgttatctgaatgaagttgaattctacaagatttcgcatatgatgaaggaaaaacgtcgcgagcgagaagagttggtcgaagaggttgtccacaagatcgagacctatgctggggaacgccatctgcatgggaaaatttatggtcgaccaaagcatatctattcgatctatcgcaaaatgcaggataagaagaaacgcttcgatgaaatctatgacttgattgccatccgctgcatcctggacactccaagtgatgtttatgccatgctgggctatatccatgagctctggaagccaatgccgggtcgatttaaggactatattgccaaccggaaggccaatggctatcagtccatccatacgactgtatacggccctaaaggaccgattgagttccagatccgaaccaaggaaatgcatgaggttgctgagtacggggttgcggctcactgggcctataaaaaagggatcaagggtcaagttaacagcaaggaatcggctattgggatgaactggattaaggagatgatggaactccaagaccagtcaggcgatgccaaagaatttgttgaaaatgtaaaagaagacatcctggcagaagagatttacgtcttcacaccagatggaaccgtgcgctcgcttccgaaagattctgggccgatcgattttgcctatgaaatccacaccaaggttggggaaaaagcgattggtgccaaggtcaacggccggatggtgccccttaataccaaacttcggacgggagaccaggtggagattatcaccaatgccaactcctttggtccgagccgtgactggctgacccttgttaaaactagcaaggcgcgtaacaagatccgtcagttctttaaaaatcaagataaggaattatcgattaaccggggtcgggacctcttgatggcccaattccacgagcatgacttggtagccaataagttcatggacaaaaagcacatggacaaagtgctacaaaaatcaagttacaagacagaagaagccttgtttgcggcgattggttttggagagattggggctattaccatctttaaccgcttgacggaggatgaacgccgggaagaagaacgggctaaggcacgcgcagaagcagaagagctggtcaaaggtggcgaggtcaaggttgaaaataaaaaagacaccttgaaggtccgtcacgaaggtggcgtggtcatccaaggcgcttctgggctcttgattcggattgctaagtgctgtaacccagttccaggcgatgaaatcgttggctacatcaccaaaggacgcggtgttgcgattcaccgtcaggactgtatgaatctccgagctcaagacaactacgagcaacgtttgattgatgtggaatgggaagataacaacacgaccaaggactacatcgctcacatcgatatttacggactcaaccgtgccggacttctgaacgatgtactacaagtcctctccaatacagctaagatggtctcaaccgtcaatgcccaaccaaccaaagacatgaaatttgccaatatccacatttcctttggaattccaaacctgtctatgttgacaacggttgtggataagattaagagtgtgccggaggtgtactctgttaagcgtaccaacggctagtcttctgcgaaaatcgacttcatactgcgttagtttcgactggtctaactacagttatgcctgcgtctcactgccttgtctgatgtcgattttctttgaagaagctaggatatgttcagaactcttttattgcttgattagctcgtcgtctgtggttgatgttctttcaagggtagcagtgaatgttcaataggtttataaaacaggataataaaatgaaattagtaattcaacgggtcaagagtgcctcggtttccattgatggccaagtttacaatgcgatccagcaaggcttgctactcttagtgggagtagggcctaaggatgaccagaaggatttggagtatgcggtccgcaaggtatcgcagatgcgtattttctcagatgaggaagataagatgaatctttcggtcaaagatattcaaggagaaatcttgtcgatctctcaatttaccctctttgcggagacaaaaaaaggcaaccgtcctgcttttataggggctgccaagccagatatggccagtcagttatatgatgcctttaatgatcaattagaaaaagaagtccctgtcaaacgagggatctttggagccgatatggcgattgaattgatcaatgatggtccagtgacgattttgctagatacaaaacatccataagtaagaaaacatgcagtcgggttagactgcatgtttttcgatatagagttgttgggcgatcacttggttgatagaaatttcttgtccatggataacgaagtgatagaggcctgtgtagtcatcgtaccgttgaaacacgatggtatcaccaatttggagatggatctggtctaaaaattttaacaattcataggtgtcatagaccctttgcagaatatacagaccaggctcagtcgtttcactgagacggtcttggtaggcttcgacaagcctttcacctttctttggaattgtcccaccatgagggcaggtcttaggatttccaagcatgtgatccagccggtcgatgaaatgttcagaaacggtatgctcgagaacttctgcctcttcatggacttcttcagttgtgtagccaagatttttcagcagaaatacttcgatcaagcggtgcttgcggtagagatcagagaccaattgcgagcccagatctgttagtagatagccatgggtcttatctttcactaggagaccctcagagaccatccgcttaatcatttcggtcacagcgggtggagagacctgcatgcgactagcgatttccttattactgattttttctacttctgtgccaatttcataaatgcacttgaggtaatcttctttgtttggtgtcatgctttcctcttttcttcgctcacttctagtatatcaaaaaaatcttcaaaaacgctagtggagtaatgagaattgtctcaagctccaaaagatggtagtatagaagcatagaaaggacggcactatgaacagacgggaattagtgagattaggctggagagagagtagtttagcctatctagagaagcacttgcagggattgaaagatccacaagcctaccaagaacaataccagtctgtctttttctttgccagtcctctgtttcaaaatatgtggtttcaagagatcaaggatctaacggaaacggctgcccaagacttgctgaggggagtcatgaaaattcttcttatgccaagtgacctgtccggaacttgtgaagaaacagcctttcttctgagtaggatggctccagattgtccgccaggttccgatttttggaaggttttttcacacgtcgtgcaaatcgcctttgaaaaggatcccttagcagatcagtcgggagatcagctcttgaaacgccaggttcaccagttgcgctacctactttcaagttaccaagcccagtggattcggacgcatgaggccagagctggacagactgacgaggaggccttacaagcttacttacaggaggctagagcggtcacggtggatgcttatgcggctgcccgccttcacaataaggtctccctaaggcaagatggtcaccttcattatccatcaggggcttcccaacaagtcaatttcaaggtcttgttgaattttcatacggagtatattctcgatcaagctgggcatttcctcaatgaagtcgatccgtatcagatttctgaaaatggcattgtcaatggagccagtttcaactatggcttagccaagggccagacccataaggacttagatattgaccccgtcaaagcttgggatccaccttttcgtaagaaggtcctctatcagcaaggagttcgctatctagctccgaagaatgaccgcggagagcaaggttattggagtcgaaaaggagtctttgcacaaggaggcaagagctacaagcaacaagtggcacagcgcgtgcggcatttcctcagaggcatccctcgcttacgctggcgcgtcctcctacagaatggacttcatcggattttatagcaatggaaaagaggtcgcagacctcttttttcatttatccaagcgcattgacggcttcgattgcagcgtcgtaatttggttcgctgttgatattgtctaggtattcaacgtaagtcaccttgttatccgcatctaagaccaagacagcgcgcgcaagtaggtgccattcattgatcaagaggccgtatgctttcccgaaggaatggtcgtagtagtctgagagcatgatggcattgtcgagcccttcagcagcgcaccatttaccttgagcaaaaggaaggtcgacagagaccgtcaagacgacagtgtcttccatatccgataaggtttgattgaagtgacgtgtttgcatcgaacagatacctgtgtcgatggatgggataatgctgaggacttttttcttgccagcaaaatcagctaaagatttcttctcaagagctggagtgatcaatgaaaaatcatgggccatttcccctacttgaagttgagatccggtaaaggtcacagggtttcctaaaaatgttgccataaaaagactccttttttcttttcattgtacatcaatgaagggggaagagccactgatttgtttagaaatctgaatggtctactgactcaatccttctgcgatcttgtctaagttccacttcatcatgctgtagtagctatcgcccttttctccttctttggcaatagaatcagtgaagatctttgcatagatcgggatattggtatccttagagacagttttcatagggcgttcatcgacactggattcgacaaagagggctggtaccttggtttgccggagcttttctaccagcgttttgatttggtcaggtgtcccttcttcttccgtattgatttcccagatataggcagatgggacgccgtaggctttggagaagtacttgaagcagccttcgctggttacaatcatcttcttctcttctgggatattgttgaatttttgtttggcttcttggtcgagcttgctgagtttttcagtataggcagctagatttttttcgtagaagtccttgtttttgggatcttttgcgatcaattgtttggcaatgtttttagcgtagaggatcccgttttcgagattgagccaagcgtgagggtcttcttttccagcttggttttggccttccaagtagatgacgtcgactccgtcgctagctgcgaaatagtctttgttttcaactttattggcatttttgaccaatttagtaaaccaagcattgccaccggtttcgaggttgatcccgttgtagaagatgaggtctgcttgcgaagtctttttgacatcttctggaagcggttcgtactcgtgaggatctttgccgacaggaacgatactgtgcagatcgatcttatcctcagcaatatttttagttatatctgcaaggattgaattggtggtgaccactttcaatttaccagaagctccagaagaagagcctttgctacaggccaacagaccaaataagagcgccacaaagagggcgaggatagaagcggtttttttcatgtgtttctcctttaatgagatgaaagagcgtgcttattctttctctgcttaggagcgataaagaagctgatgagaaagaagacagcagaagtgaggacaatacaagacccgacggcgatgtttaagctatagccaataaagagtcccaggatggatgcaagagcacctaatccggatgaaaggagcatcatggaccagagactattggtatagagataggccgtcgcagcgggtgtaatgagcatggcgacgatgagaatggttccgacactctgcatagcagtgacagaaaccaaggtcaagagcaccataaggaggtagtgatagaccttgacccggacgcccatggattgagccagaacaggatcaaaagatgtgagcagtaagggtcgaaagagtaggacaatcaccagcaagaccgcagcaccaacaccgatggttatccacatatcccggtcttggacggccaagatattcccaaagaggatgtggaaaaggtcggtggaacttttagcgactccaatcaggatgactcctaaggcgaggaaagaagaaaaggtaatcccaattgcagtgtcgctcttgatgatggagttgctcttgatataggtgataaggacggacgccaggaggccaaagacaatagcgccaataaagaaattgatgcccaggataaaggagagagccacaccaggaagaactgcgtgtgagatagcgtctcccatgagagacatgcctcttaaaataatgaagcatccaacggctccagcgacaatcccgatggcgatggctgtgatcagggcattctgtaagaagtggaattgctgtaatccatcgataaattctgtaatcatccgacgccacctcctataaagagttcatgcccataggctgcatgcagattttctttggtaaaggtttcctctgttttcccaaatgcaatcagtttacgatgaaggaggaggacctggtcgaaataagctgggaccttgctgaggtcgtgatggacgatcagaatggtcttgccttcttgtttcaaggtctggagggtctgcatgatgatgtcttcgctgacagagtcaatccctgcgaagggctcatccaaaaaaatgacatccgcttcttggaccaagcagcgggcgatcagcacccgttggaattgccctcctgaaagctggccgatctggcgatccgctagatcaagaagattgacaagtttcaaggcattttccactttttggagatcttctttgctttttctcttgaagatagaaaggtggggataaagacccagtgagatgcactctctcaccgtgatgggaaagtggaaatcaatagcggatttctgttcgacgtaggccacccgttgaagaacttggctgagatctttttgatcgagctggacctttcccgcatgagggagaagtcctagcatggccttgattagggttgattttccagccccattggggccaagaatgcctaggatggttggaccctggatggtgagggaaagatcctccaaggccagtgtttgctggtaagcaacactgagatgttcaaattgaatcatgattttgctcctttaccattaatatacatgaataaaaaaattaagtcaagttaatttttgaaataattatacacgaataaaaagttaagtcaagttaatttttaaaataattcaacttaaatctcttgaaatcattgaaaaaagttcctatttttgataaggttattagaaaagaatgaaagcgagaagatcatggtacgtttacaagatgatttttatgattacgtcaatggggaatgggctgagacagctgtgattcctgatgacaaaccgtcaactggtggttttatggacttgatccaagacatcgaaaacttgatgttggatatcactggaaaatggcaacggggagaagagctgcctgaagatagcattctgcaaaactttgtcaaataccataaaatggtggcagattttgatgcgcgagaagcagctggtgtggcaccagtcatgcccttgatcaatgaaattaaggctctgtcttcttttgaagactataccagcaagttggggacctatgaactagctggcaaaccaaatctcatgccatttagcgtgtcaccagactttatgaatgcccaaatgaatgtcttgtggggagagtctcttgctctcatcttgccagatacaacctattatgaagaaggcaacgaaaaaggcccagaattactggctatctggcgccaaatgatggaaaaactcttacctaaatttgaattctcagaggaagaaatcaaggatatcctggataaggtcattgcggcggatgcagaattggccaaatatgttttgtcaaatgaagaaagatcagagtacaacaaactctatcatccttatgagtgggcagatttcaaggccttggtcccagaattgccactcgatgccttctttactgaagtgatcggacaaacaccagataaaatcatcgtgccagaagagcgtttctggaaggaattcgcaccaaaatactactcggcagccaactgggaaaccattcatgccaaattgaaacttggtgcagctttagattggacgtctttcttgacggaagaaatccgtgtcttgtctggtgaatatggacggatcatcacggggatcccagaacctcgtccaaaagaaaaagccgctctggccttggcagaaggaccttatagccaagcacttggactctggtatgcgggagaaaaattctcaccagaagcaaaagcagacgtagagcataaagtagcgaccatgattgacgtctataaggagcgcttagaaaaagcagactggctcgctcctgaaacccgcgaaaaagccattgtcaaactcaatgtcatcacaccgcatatcggctaccctgaaaaattaccagaaacatacgccaaaaagatcatcgacgagagcaaaaacttggtagaaaatgcccaaaaattggctcaaatttccattgcccatacttggagcaagtggaaccaaccagtcgatcggagcgaatggcacatgccagctaatatggtcaatgcctactatgatccgcaacaaaaccaaatcgtcttcccagcagcaattttgcaggcacctttctatgatcttcaccaatcgtcatcagccaactacggtggaatcggtgcggtcattgcccatgaaatctcccacgcctttgacaccaatggtgcttcctttgacgagcacggtagcttgaaagactggtggaagccagaagattacgaagcctttaccgctcgcacgcaaaaggtcatcgatcagtttgaaggccaagactcatacggtgccaagattaacgggaaattgactgtttctgaaaacgtggcagacctcggagggatcgctgcagcccttgaagcagcgaagaaagaagcagacttctcagcagaagaattcttcaccaactttgctcgcatctggcgcatgaaagctcggacagagtatatgcaactcctcgcaagtgtcgatgtccacgcaccagggaaactccgtaccaatgttcaattgccaaactttgacgaattctttgaaacctttgatgtcaaagaaggagatggcatgtggcgcgcaccagaggatcgtgtaattatttggtagtctcgacttcagttaagcaattgattgatttttttgatcgctcgtgaaaaaaactaaaaatccccgaagccaagtttcagctgactgaaactagctttggggatttttgagtggattagaaataataaggaacgtcaaacgaaggtggagcgctttcgatcattttgtcgacaaaccaagaactcccataccttatggtaatgggagttctttttctattttcttctttttggatcggtttgtttaaagatcaggtataaaattccggcaggcaagaagcagaagagccacataacatcgagtcccttgcttttactgctagaggtcgttgctttagactcactgacggccactcccggtttaatgcttggagatacctgttgcaagccgttctggacgactaggcggttattttctagttttagcgctggcttcgtccccttcttaacggtcgcatagaagtcttgcttcaagtgaattgtcttcccgtcgatggtatgatcgcctgcagagaggatttttttatactggtagtctgcgaacattttctcagccaaggtattcccgatttgattgcggtagctttcggcgatctcgacatcgtagttcccaacccccaaaatcacttcgataatccgctgtttaccccgcttggttgtcgcggtgtagttgtagtcagcagtcgggctggatccagttttgagtccatctgttcctttaagggcgaattttccaccttcgagggaagtgttgtaattatcgtagctttgctcgtagggggttccttccatgatggtagtatgagcttgcttggtgtattccaacatttctggcaggtcgtttacgatgtgataagccagaatagacatgtctcgcgctgtaatttcgttattcgcattgacgtcgtggcgctgaggattgtagtagccctgaaggaccgagatcatcgccccatttggattgtgccattcggtatggctcatccccatttcttgtgcgtactgattcattaagtccaaaaacttatcgggatcattgtcagtgacggcgttggcgagcataatcacagccgcactggaagatggaacaaagagcatcttgatcaattcagatactttgtagtctacaccagctacaatcggtgagttacttaacagattgttttctgagatggcttggtctgcctctgttgctgtgactacggtatcgtacttgatcttgccttctttaagagcccgaaagaccacataggcactcatgagcttggccatgcttcctgagtcccggaccgtgtcgatattgtctccgtacaaaatggctccagtattggcgtcgatgacgatgtcggccttgggcttgtaaaaatcgtccaataccagtccagcatcagctgcgattttcatgacatcttcttgctggtagatgtcgtccgcaaaggcagtggaaatagggcctaatgtcaagactcctacaaggagggacaagaggctgtgttttagtcgtttgtgtaaatgtctcccataattcatagattccattatatcatacaggccagggatttaacttgaaaaaattctagaaaaagaagaaattgaaaaaataaagaaaaaatagaataatttcgcagtaaaagcgtttacatttccctagaaagtgctataatttaaattgagtataacattttttacaatgaggtgatttatatgaacaaagggaaggtactcttagctaccagcgctctgcttttatcagctggtgtactggcagcctgctcaggaggaaaatctggaagtcccggcgatcagacttttagctatgtctatacccaggatccggatactctcgactattcgatttctaataaaaaatcgacttccgagtttacaggaaatgcgatagatggcttgttggaagtggacaagtacgggaacttgatcccatcgcttgctaaagactggactgtttccaaggatggcttgacctatacttataaactccgtaaaggggtcaaatggatgacttctgaaggggaagaatatggagaagtcaaggctcaagactttgtcacaggtctcaagcacgcggcagacaagaaatcacaagcgatttacttggtccaaaaatctgtcaaaggcttggatgattatgtatcagggaagacatctgatttctcaactgttggtgtaaaagctattgatgattacactgttcaatatactttgagtcaaccagaaagtttctggaattctaagactacgatggggatcctgatgccggtcaacgaagaattcttgaaatccaagggagatgattacggtcaaggaacctctccgtctagtatcctctactgcggaccttatttgatcaaatccattacttcgaaatcttctgcgatattagaaaaaaatccaacctactgggatgcggaaaatgtcaagatcagtaaagtcaaactgacctattatgatggtcaagactccgagtctctgatccgtggatttgataacggtgactatacagttgcccgtgttttcccaaatggttccaactataagagtgtagagaagaagcataaggacgacatcgtctatactgaccaaggttcctcaacctataacctttccttcaacattgaccgtcaggcctatgaaatcacaaagaagaccacggatgctcaaaaggcctctaccaagaaagcaatcttgaacaagggcttccgtcaagctattatgtttgccttcaaccgcaaggcttatgtagcgcaaactaacggggaagcgggtgccaataaggtgatccgtaatacctttacgccaccaaactttgtccaaatcgatggcaaacaatttggtgatgcagtagaaaaagacttagaagcttatggggatgaatggaaaggggtctctgtcgcagatggaaaagacaccctctacaatccaagcaaggccaaagaagagtttgccaaagctaaggcagaattgcagtctcaaggagttgaattcccaattcatttagaccttccaacttcttcgacttatacggaaggaatcaaacaagcccaatccttcaaacagtcgattgaatctacattgggagcagaaaatattgtcatcgatctgaatatggtttctgaggatgatcttcaacgagtgacttactttgctgaaaatgcttcccaacaagactgggatctaaacaataacttgggctggggaccagactatacggacccatcttcttacatcgacatcaccagtggtaaatctggtgaaaatgccaattcttactttggattcgatgctggtacggataatgcggcggcaaaagcagctggctttgatgagtacaatcaattaattgaggacgctcaaaaagaaaacactgatgtgaacaagcgttatgaaaaatatgctgcggctcaggcttggttgaccgatagcgccctcttgattccgattcattcggatggggcttctccagtcgttcgtaagactgtaccatactctgcagcctttgcttggacaggccacaagggtcaaacctttaactataagtatttagaagttcaagacaaggtcgtagcggcgaaagactatgacaaagcgcgtgaacaatggaagaaagaaaaagaagaatccaataaaaaagcgcaaaaagaacttgaaaagcatgtgaaatagacttttcttagcgaaaacaggatggacaggtcccgtatgggacctgtctttttctttgtctgaacctttaaaaatcgcctaaaaatggtataataggagcatcacgaaaattggagagacgctatgagtttttacgatcataaagaaatcgagcctaagtggcaaaaatactgggctgaccatcatacttttaagacaggaacagatgcttcaaaacctaagttttatgcattggacatgttcccttacccatctggagcgggtctgcacgtaggacacccagaaggatacacagcgactgatatcctcagccgtttcaaacgtgcacaaggctacaacgtccttcacccaatgggctgggatgcctttggtttgcctgcagagcaatacgctatggatacagggaatgacccagcggaattcacagcggaaaacattgctaacttcaaacgccaaatcaatgcgcttggattctcttacgactgggaccgtgaagtcaacacgacagatccaaactactacaaatggacgcaatggattttcaccaagctttatgaaaaaggtttggcttatgaagcggaagtgccagtaaactgggttgaagaattgggaacagccatcgccaacgaagaagtccttcctgacggaacttctgagcgtggaggctatccagttgtccgtaaaccaatgcgccaatggatgcttaaaatcaccgcctatgcagagcgcttgctggctgacttggatgatcttgactggccagagtctatcaaggacatgcaacgcaactggattgggaaatcaactggtgccaatgtcaccttcaaagtgaaaggtactgacaaggaattcaccgtctttacgacacgtccagatacccttttcggtgcgaccttcactgttttggcgcctgagcatgaactggtagatgctatcacaagtcctgaacaagctgaggctgtagctaactacaaacaccaagctagccttaaatcagacttggctcgtaccgaccttgccaaggaaaaaacaggtgtttggactggagcttatgctatcaaccctgtaaacggcaaagaaattccaatctggattgcggactatgttcttgctagctacggaacaggtgccgttatggccgtacctgcccatgatgagcgtgactgggaatttgctaaacaatttgaccttccaatcgtagaagtcttggaaggtggaaacgtagcagaagctgcctacacagaagatggccttcacgtcaattctgacttcttggacggtctcaacaaagaagacgcgattactaaaattgtggcttggttggaagaaaaaggctgtggtcaagaaaaggttacctaccgtctccgtgactggctctttagccgtcaacgttactggggtgaaccaattccaatcattcattgggaagatggaacttcaacagctgttccagaaagtgaattgccacttgtactgccagtcaccaaggacatccgcccttcaggtactggtgaaagcccactagctaacttgacagactggctggaagtgactcgtgaagatggggtcaaaggtcgtcgtgaaaccaatacgatgccacaatgggccggttcaagctggtactacctccgctatatcgacccacataacacagagaaattagctgatgaggacctcctcaaacaatggttgccagtcgatatctatgtgggtggtgcagaacatgccgtacttcacttgctttacgctcgtttctggcataaattcctctatgaccttggtgttgtaccgactaaagagccattccaaaaactctttaaccaaggaatgatcttgggaaccagctaccgtgaccaccgtggtgctcttgtagcgactgacaaggttgaaaaacgtgacggttccttcttccatgtggaaacaggggaagaattggaacaagcaccagctaagatgtctaaatccctcaagaacgtggtgaacccagacgatgtggtggaacaatacggtgccgatacccttcgtgtctatgaaatgttcatgggaccactcgatgcctccatcgcttggtctgaagaaggtctggaaggaagccgtaaattcctcgaccgtgtgtaccgtttgattacaagtaaagaaatcgttgcggaaaacaatggtgctcttgacaaggtttataacgaaaccgttaaagctgtcacagagcaaatcgagtccatgaaattcaacacagccattgcccagctcatggtctttgtcaacgcggcgaacaaggaaaacaaactctatgtggattacgccaaaggctttatccaattgattgccccatttgcccctcacttggcagaagaactctggcaaacagttgcagcaacaggtgagtctatctcttatgtagcttggccaacatgggacgaaagcaaattggttgaagacgaaatcgagatcgttgtccaaatcaaaggaaaagtccgtgctaaactcatggtcgcgaaagacctttctcgtgaagaattgcaagaagtcgctctagctgacgacaaagtcaaggcagaaatcgatggcaaggacatcgtgaaagtgattagtgtccctaataaacttgttaatatcgttgttaaataacgagtttattagccctatctgccaccttcaatagtccactggactattgaagccaactaaattggttaatattgttgtaaaataaaaatgaatccttcagagtttgaactgcaccccaaaagttagacagaaaaaaatctaacttttggggtgtttttattatgaaattaacttatgaagataaagttcagatctatgaacataaaaaacaagggcgaagcttcaaagagctttcaaatcaatttgggataaacatttctaatcttaagtacatgattaaattgattgatcgttatggaatagaaatcgtcaaaaaaggaaagaattgttactattctcccgaactaaaacaagaaatcattgataaagttctgcttgaaagtcgttcacaaataaaggtatctctagattatgctcttccaagtgttggaatgttgcataattggatagcacaatataagaaaaacgggtatactattgttgagaaaacaagaggaaggatacctaaaatgggacgtaagccaaagaagaaacccgaagagatgacagaactagaacgtcttcaagcagaaaatgagtacttgagagcggagaatgcggttctaaaaaagttgagagaactccgattgagggacgaaaaagagcaagaagaaagacggaaattgtccgaggattggtaacagagtttgctttagagattcttctaaagattattaagcttgcccgttcaacttattattatcatttaaaacagctcgatcaaagcgataaggattatgatgttaaagttgaaattcaatctatttttactgagcataaagggaattacggctatcgtcgaatgactcttgaattgaggaatcgtggttttgtagtgaatcataagaaggtccaacgtctgatgaaggtccttggtttaagtgctcgtattcgtcgtaaacggaagtattcttcataccaaggagagattggtaagaaagcagataatcttattcaacgccaatttgaagcaaccaagccaatggaaaagtgctacacagatgtgaccgagtttgccattccagcaagcaatcaaaaactttatttatcgccagttttagatggttttaatagcgaaattatcgcctataatctttcgacttcaccgaatttagaacaagtgaaagctatgttagaccaggcctttactgagaatcattacacaaatacaattcttcatagtgatcaaggatggcagtatcaacaccagtattatcatcgttttttagaggataaaggaattcaaccgtccatgtcacgtaaaggaaacagcccagacaacggcatgatggaatccttctttggcattttgaaatcggaaatgttttatggttacgagaatacatttaagtcacttaaccaattggaacaagctattgtaaactatattgactattacaacaacaaacgaattaaggtaaaactaaaaggacttagtcctgtgcaatacaggactaaatccttaacttaaattatttgtctaactttttggggtcagtacagttcagctctggaggattttttaggctcagcttgacaataaatagtatttttgttaatatcattaacaaaagagaggcgctatgaataagaaagaactgtataagtttaataatcgttttaacagctttgctttagcttttgaacagttgaaaaaagctcagcataggaacagtattgataaatcaatcactattaatgaagtccatttgatcgacctgataggtcgcaatcagcctgtgaatctagtgaaattatctgagttacttgaagtatctaggagtgccattactcagagtgttagacgtttaaccaagaaagacctcgttacttttgaatttgcaccggataatgaaaaaaataaatatctgatattatccaaaaaaggtgttgaagtttttaatatccataaagagcagcaagaacatattgaaaaggccattttttcagttttaagaaactatagtgaggaggatcttcaaatggttatgaaactgatggatgatgttgaacaggtatggcaagaattgccgtggtaaaaatcacggtaattttaaaactatattgttaattatattaacaaaaagaggaagatatgaatatacaaattgaactgatctcagagtctgatttagcagacgaatcttttaatattgtcatcgatggcttaaaaccaagagaaacctatcgagtcgaaatgtatttatctgattattattgtatcaatgctcctatgcttttagctcataatgttttatggaaatcaacagcgacttttgtatcagataagaatggtattattgatatttcacaaactccatcttgttctggctcttatgaagatattgcaacaatggggttattctttaatgctaagcccttgaccaataggaaaaagaaacttccaaactctctttctaaaattcccttattagatcacttttttgtggaaatcaaaattatacaaggtaatgctgtcgtcgcagagagaactttcacaagacattacatgagtttgcaaattagtcatcaagatatttacgggaaacattttcaagggagactcttttatgatcaaaaggcaataaaagcaccagcattgattattgtgagcggtagtgaaggaaggattgaaaaggcacagaatatagctcagcttctatcttctagaggttatatttgcctagcagttgcctactttggtttagaggggttgccaaaacatttggaacgtattcctttagagtgccttgtggaagcaaaggattatctacgtcagcatcatcaagtagatagtgaaagaattggaatctatggacgttctaagggagcagagttagttttagctgaggagaacatttttaatgacgttcaatgtttggtactaaattcaccctctgatgtggtgtatgaagggataaaagggaaatggaactcccatacttcttcttggacgtatttgcaaaaggaacttacctatcaaaagtttcgactgagagattatctgtttagcaaactttttagaaaacctatccctaaagatcgctctgctaggatagacattagtagactctcttcgccaatcttattgctcggaagtactgttgatgaaatatgggatgcctcgtcagcaatagccaatattgtctcacattataaaggccaccacattacatttaaaaaataccatgaaataggtcacatgttgacagtggcttatcaacccaatcatcgctatcgaaaagattggcgtttattgatgaaagagagtgaggattcttggttggctacgattcatttttttgataggcatttgaagaagcaataacataagattataaatatgctataatagtcccaactaagataaaaacacagttctggttggtagtccagacgtaggcaagcctatcagtaaccttcctccttggttgtccattcttagggatagatttaaggaggtgctgtcgtggaaacaatttcaattggattgacagtttattttgaagatggattttggcatggtttgttcgaacaagtgtatcgagaaacttatcaagtttgtcgtgtgacatttggtcaggagccaaaagatgatgaaattttagagatgttacagactcagtttactcatttatcttttagtccagaagctacagttaagcaacatgtaaaaatcaagaatcctaaacgattacagcgagctgtgaagaaacaagtaaagaagaaaatttcttccaagtcgaaagaactattgcagttgcagtatgaggaaaggaaaaagatttcaaaacatcaatctagtgtccaaaagcaattgctcaaacaagagaaattcgaacgcaaacagcaaaaacgaagagacaagcataaaggacattaacccttatctctttcatcaaaaaagcttcggtaggaagaaacctaccgaggctttttaataaattttattctgcattacagcgaacagatgtaaaactcagtggttgttctaaaggagtttaaatgttgctcttcttccaagaaaaatggtgaaaaaagagaaaaagtctggtcatttggagctgtgcaagaatcctttgaagagccacttgtcaaaaaaatactatttctatatcgaaatagttgacagatgtaataagcagtggtacaatgactttgatatttcgatatagaaataaaaaggagacaaaatgtacaagatgcaagggggctaccaagctttacagatacgcttgttaaatgggcgtatctttcaaaaactgctgagtaaggaaccagatgccctataccgaagtgaacaagggaaaattttaacgattttgtggaagcaagagttggagtgcgctactgcgaccgatatcgctcttgcgacgggtctagccaacaatacattgaccagcatggttaagaaattggaagaacaaggcttggttacgattcaaccttgtacgcaggataaaaggaaaaaatatatttctttgacagacctcggttgggcacaaaaggaaattggggatcgtgttagtaaggaactgggtgagattttctatcaaggattttcggatcaagaaattcgagaatttgaagcctatcaagagcggataatctcaaatctaaaagctaaagagaatgacatctagggaaaggaggcaacagttatgattggaattacaggtgtaacagggaaattaggttcctatgtggcggatcttgtcgataaaaaaggaatcgcttccgtccatctggcaagaagcccagagcgtgcaaaagtttatgcgtcagcggaacttcgtaagatggtgtatgccaatactccagaggtggttgaggccttaaagggtatcgatgtcttattgatggtctctgctcgggaaaatccagagcgtgtcaaggagcacaaggagtttttagatgctgcaaagctggcgggggtgcagcatattgtttatacctccttttatggggcagatgagaaggcaacttttaccttgtctcgagatcatgcccagacggaagcctatatcaaggagttaggattcacctacacttttttgagagataatttttacttggacttcttgattgatatggcgcttgaaaatggagagattcgtggtccggctggcagtgggcaggtatcagctgttgcccgtaaggacacatctagggttgcagcagaaattcttttaaaccctaaggagtgggagaatcaaagcttgaatctgacagggccagaggatctttctatggaagaaatcgtagcgctcctctcaaaagagagcggtaaaaccatcacgtatgtggatgaatcagtagaagaagcctatgagtcacggaaaaaatggccagcacaaacttgggagtacgatgcctgggtcagcacttatacagcgattaaatctggggaacaagctggggtttctacagatgtcgaaaaagtcctagggcatccagcaagtagcttattggatattcttagagacagaaaacttattgaggaaaaatatgattgaatacaaacatgtagccttgcgctacacggataaaaacattttaaaagatgtcaatctccgcattgaaaatggagaatttatggttcttgtgggaccttcaggatctggaaagactaccatgatcaagatggtgaaccgtcttttggaaccgacagatggcaatatctatatggatgggaaacgcatcaaagactatgacgaacgggagttacgtctcagtaccggctatgtccttcaagccattgccctatttccaaacttgaccgttgctgaaaatatagcattgattcctgagatgaagggctggactaaagaacaaatcacttctaagacagaagaactcttggataaggtggggctccctgctgcagagtatgcaaatcgcatgcctagtgaattatctggtggggagcaacagcggattggcattgtacgagccatcattggggaaccaaagattctattgatggacgagcctttttcagccttggatgccatctctcgaaagcagttgcaggcacttaccaaagaactgcacaaagaattcggtatgaccactatttttgtgacccatgacacagacgaggctttgaaattaggcgatcgaattgcagtactgcaagaaggagagattgtacaggtagcggattctgagaccattcttgccaagccagccaacgactttgtcgcagatctatttggaggtgctcaccatgtctaaactacttgcaacctttcaagaacgctttggggactggctcactgcactggggcaacatttgcaactgtcattactgaccttgctccttgcgatttttctagctgttcctctagctatttatttgagtatccacaaaagaacaagcaactgggtcttacagctagctgggatcttccagaccattccttccatggctcttttgggcctcttcattcctattatgggaatcgggacgctcccggccttaacagctcttgtcatctatgccattttccccatccttcaaaataccatcactggtttacaagggattgatccaagcttggaagaagctggaatcgcctttgggatgaccaagtgggagcgactcaagaagtttgagattcccttggctatgcctgtcatcatgtctgggattcgcacggcagcagtgatgattatcgggacagctactctagctgccttgattggagcagggggactcggttcctttatccttctggggattgaccgcaataatgcgagtctgattttgatcggtgccctatcttctgccttcttagccatcgcctttaaccttcttctcaaatggatggaaaaggccaaattgcggaccatctttgcggcttttgctgtgatggttattggattaggagcttcttatacaccaagtcttcttccaaaaccgaagaaagaaaatctggtcatcgctggaaagttaggaccagaacctgaaattctcgccaatatgtataagatcttgatcgagaaaaatacagatatgacagtgaccgtcaaaccgaattttggcaagaccaccttcctctatgaagccctgaaaaaaggggatatcactatctatccagagtttacaggtacggtgaccgaaagtctcctcaagccagcaccacaagtcagtcatgatccagaaacagtctacaaagctgcccgagatgggatcaaacgacaagacgacctggccttgctcaaaccgatggcttatcaaaatacctatgctgttgcagtccctaaaaggattgcccaagagtatggactcaagactatttcagatttgaaaaaggtggaaggacaactcagggcaggctttacgcttgagtttaacgaccgagaggacggaaacaaaggcttgcagaagatctatggtctcaacttacaagtctccaccatggagccagcccttcgctaccaggcgatccagtctggggatattcaaataacggatgcctactcaacagatgccgagctggctcgttatgacctggtggtccttgaagatgacaagcaactcttcccaccttatcaaggggcgcccctcatgaaagaagctcttcttaagaaacatcccgaattagaagctgttctcaataagttggcgggtaaaattacggaagcccagatgagccagatgaactaccaagtcggagtagaaggcaagcctgctgctaaagtagcgcgtgactttttggtaaaagaagggttgataaaaaattaacaaaccattctcaagtctttgcacttgagaattttttaatagaaagcaattttatatcctttcagcaagcttttgggttagaaggggagaccttctcttcaaaaaaaactccattgagtctggcttaaaattatgttacaataagccttgaaaatgaatgaaagtatatggaaaaaagtatgaaaaaacgaccagtgattggaattacaggaaatgaaagacccttcccggatgatccagacgcgaacatgagttatgcggcgactggttttgtcgaagcggtcaaagaggcaggagggattcccttgatcttgccaattggagatgcggccttggccaaagactacatatcgatgattgataagctcatcatcaccggtggacaaaatgtcttgcccaagttttacggagaagaaatcaccatcgacagcgatgactacctcttgaaacgcgatctctttgagttggccttgattgaagaggcgcgtgcggctaaaaaagcgatctttaccgtctgccgtggaacccagctctataatgtcgctctagggggaacgctgcatcaagatattgaacaccattggcaggacaatccaggtcagtacactagccaagagttggtgaccaaagatcagacggtcttacaagagatctatggtaagaccagtcgcatcaattcttttcatcatcaaagtattaaagacttggcagatggcttagaagtgatcgcgcgggatcctaaagatgacgtcatagaagccgttcaatccacagatgagagtcgtttcctcggcgttcagtggcacccggaactacgttttgacaagagcccagcagatcgcaagctctttgaatatgtcgtgactcaattgtaaagtggaccagctcccttaggaatttttcctaaggggctttttctttaatctgcgtaagaaagactgtaaattgtgcctaggttttgggggaggattcgctacaatagagctagtagaatgaggaggattaggacatgtatcaatttccaaaggattttttatgggggagttcgacctcgggacctcaaacggaaggacgtttcgcccaggatggaaagggagacaatctctgggattactggtatagggtcgagcccaaccgcttttatcaagggcaaggacccgagaaaacatcgactttttatgaacactgggaagaagatttggatctcttgttagaaaccggccacacggcctttcggacctctatccagtggtcacgtattttcccagaaggccgaggggaaatcaatcaagcaggtgttgatttctaccgtcgtgtctttgaaaagataaaggaaaaagggattcacctcttggtcaacctctatcattttgatttaccgatggctcttcaagagcaaggggatggttgggaaaataaagaaaccgcctatgcttaccaggaatatgcgcgtttttgtttcaagacctatggagatctggtcgatcagtggatcacctttaatgaacccattgtccctgtggagtttggctatttttatgatgcccattttcctcataaggtagacgcggcagcagcagttaaagtagcctactacacccagttagcaagctctctagcggttaaggcctgtcacgaggtggatcctaactatcgtatcgggattgtgctcaatttgacaccagcctatcctcggagccagcatccagaagatgtgaaagctgcgcgcattgccgagctctttcaagccaaatccttcttagatccatctgttcttggtcattatcctgaagaattagtggagatcctacgggagcgtgatctcttaccggattatgatccctttgaattgcgcttgatcgaggaaaatacggtggattacctaggggttaactattaccaaccactccgtgtggcggctcctcgttatgctccaaatccagcatctcccctactctttgaacaattttatgaaccttacgttatgccagggcgcaagatcaatccccaccgtggttgggaaatctatgagcaaggtttgtatgacattgcccaaaatatcaaggaaaactatggcaatatcgagtggatcctgaccgaaaacgggatgggggttgaaggagaggaaaaattccgcaaggatggagtgatccaagacgactaccggattgactttgtcaaagaccatcttcgtgagctccaccgggctattcaagatggtgccaactgtaaaggttatttgatctggacctttattgactgctggtcatggctcaatggctacaagaaccgctatggtttagttgagttggacctcgaaagtcaaaaacgaaccctcaaaaaatccggccattggttccgtgagttgagccagcagaatggatttgaagagtagaaaaagcaacctatcaaccaagatgttgataggtttttcttaaccctcccttaactagaccaattttattgaatttcctagttgacaaactagaagaagcattgtatactgactccgctggttgctttttggtcaaattagactagaccaattttaaagtaactgagaaatcgaccatgggtcgtttgactaagtaaaggggaaagtatagcaaggctatatcgtaaaaactatgtgcggaatcgttggtgttgtaggaaatacaaatgctactgatattttgattcaaggacttgaaaagctcgaataccgaggttatgactctgcgggtgtttttctggctagtgaaggcaagagccaattggtaaaggcagttggccgcattgcagaattgtcgtctaaggcagaaggtgttgaaggaacagctgggattggacatacccgttgggccactcacggaaaaccaactgaggataatgcccacccacaccgttctgaaacaggtcgctttgttttggtacacaatggtgtcattgaaaactaccttgaaatcaaggaagaatacctagccggtcaccatttcaaggggcaaacagatacagaaatcgccgcccacttgatcggaaaattcgctgaagaagatggcttgtctacgcttgaagccttcaaaaaagccctccacatcatccgtggggcctatgcctttgctttgatggatgcagaagatccaagcaccatctatgtggcaaaaaataaatcaccactcttgattggtcttggggatggttacaatatggtctgctcagatgccatggccatgattcgtgagaccaaccaatatatggaaatccatgacaaagagttggtcatcgtcaaagcagacagcgttgaagtccaagactacgatggaaatcgtcgtgagcgcgctagctatacggctgaacttgacctttctgatattggaaaagggacttacccatactacatgctcaaggaaatcgatgagcaaccaactgtcatgcgtaagttgatccaagcctatacagatgaatctggtcaagtagtagtagacccagctattatcaaggctgttcaagaagcagaccgcatctatatccttgcggctggtacctcttaccatgctggatttgcgtctaaaaaaatgttggaagagttgacggataccccagtagaactcggtatttcatctgagtgggggtatggtatgccacttctcagcaagaaaccactcttcatctttatcagccaatctggtgaaacagccgatagccgtcaagtgttggtcaaggccaatgaaatgggcattccaagcttgacagtaaccaatgttccaggttcaactctttcacgtgaagcagacatgaccatgttgctccatgctggacctgaaattgcggtagcttctactaaggcttatacggctcaaatcgcagcccttgcctttcttgcgaaagctgttggggaagccaatggcaatgagaaggccaaagcctttgatttggtgcacgaattgtctatcgttgcccaatcgatcgaatcaaccctttcagaaaaagaagtgatcgacgaaaaagtccgtggcttgttggaaacaacccgcaatgctttctatatcggacgtggccaagactactttgttgctatggaagccagtctgaaactaaaagaaatttcttacatccaatgtgaaggcttcgctgcgggtgagttgaaacacggtaccatcgctctgatcgaagagggtacaccggtcatcgccctcttgtcagatccagtcctagccagccacacacgtgggaacatccaagaagtggcagcacgtggggcccatgttttaaccattgcagaagaaaatgtcgctaaagagacagatgatttggtcttgacagcggttcacccttacctctctccaatctcaatggtggtgccaacccaattgattgcctactttgcaacccttcatcgtggactcgatgttgataaaccacggaaccttgctaagtctgtaacagttgaataaaattatctatatagaaaaaaacatcctcgttaggtttttcctagcgaggatgtttgctttatttatcaaaaccttgcaaggctttgaggcgttcttctgtttgtcccttggcatctagttttttaccttggtaaacagcagattcccatgatccatacattggatttgggaagatgatgaatttttcaccaaattctttttgcaattcgtccaatttcttgtcgcgatcagcttcagaggtcttggaaaaatctgcaaagtcaaccaggttgtccccgaagagcaagacaagattggtcttttcttgtacagcttggcgacggccttcttttgatttgacgccatcttctaagaacatgaggtggtcacgtccttgaacaggaatgccttctttttcaaggttcttgatggtatcatctacttgagaggttgtacggtcagaaatgtagtagatttgaaccccgttttgatccgcatattgaagaaaatctttggcacctggcaccgcttttgcggctgcttttttcacccaaacatcccaatctttaggattgaaggccgtaccatctttgacgttttgaacttggtaagggctgttgtctaaaacagtttcgtccaaatccaagacgatggaataaggcttatcagaaggagtttggaggatctctttcaaacggtcagtagcgacattgtagccttgtaaatacaaagccttggtttctgctgccttttggtaccagagaacagacatggtattttcttgtgagcgctgttgatcataggtcatcgtcacctgatttttagtgctgcttgcttttgtctcttgcgttttagtggtattgcttccacaacttgtcagtaaaatgacagaagcaagagcagaaacgatggtaaaggtggtttttgttgttttcataaaccgtacactccttaaaattattctataaaaattatactcctttcaatcttgcctgacaagaaagaggagaaggcgatccagggaatggtaaaatgaatagtaagaaagaaatgttgatatgaagggctttttcacctcaatagatgccactttttcctttaaaagaaggggtatagttttctgctataaccggatcaagaaaagatcaaagcggtccttttcttctaaaatgaagcaataaagaaagatactcgcaggtccctattttcaagggcttgcgtttttttgatgccttccttaataaagaaattttaaggacttgatagggaaaatatattagtcagctacttttcgaggtgatatcatggttacaaattccagaaggaaagcagttagtctttctgttggagaaatattgaggaggattcacagtatgagtaaaaaagaattggttcttcgtgccattcgaggtgaaacagtagaacgaatccctgtaggattttggctccattatgtgacccaagaagaaaaagaattgggtctagacaatccggctgtagtagcaaaaagtattaagggccaccaacactatgtagaagaaatttcacctgattttgtcaagatcatgagcgatggcttcttccgctatccgagtgctctttattcgaaagagatccaatcgatccaagaattgaaagatattcaaccgattggagagcatcatccttggattgaaaaacagattgaagtggtcaaggagattcgttcccatttccatgaagagattgcttctttctacaatatcttctcgcctatttcttatttgaaacgctggttccgtacggatcaatcccgtggagaccaagtgattgcagactttatcaaggaggattcagaaactttagctcatgtccttgacgtgattgcaggagacatcactactttaagtcgccgcttgatccaagaagcaggtgttgaagggatttacttctcaacccagcaggtccaagatgagcgagtgacagatgaagaataccgcaagatcattgaaccgagcaatatcgctgtcctagaagcggccaatgaagctggaggtatcaatatccttcatatctgtggttttgaaggggctagcaatgaagtggagctcttcaaggattatccagctcaagtcattaactgggcgacccatcatgaaggccttagcctagccgcaggtcgtaaacttttcggcgatcgtgccgttttgggtggctttgtcaacggcaagaaaggtttgctctaccaaggggaacgagcagctattgagcaagaaacgcgtcgcttggtggctgaagccggaagccgcggtttgatccttggggcagactgtaccgtaccagacgatttccaattggaacgcttagactgggtgcgtcaagcagccgtcttgtaaaaaagaaaggagagggagatgaaaaagatcaatgtatggtgtatcgtagtaaccgttttgtttttgcttctagggctaagtaaagtcgctttagcaagcagtcatgggattgcacggaaagatccggacatcgaaaaattggagaaaattccagcccatagtctctccctcatgcgcccatctgatctagctggacttctacttctagacggacagtgataaaaaaagatgaagaacttgataaaaaatatatattagtcaaagaatgattgaagtgttaagataacaaacaagaaaagaatagaacgaggtaagaacatgtcagcaaaaagagaattagtcttaaaagtattcaaaggagaaaaagttgaccgtgtgccagttggattttggcaccattttacaacagaagaagaatggttgaaaggattttccaatccggaaattattgaaaaaaacctgaagggtcatcaaaacttccttcacaaggttcaaccagactttgttaaacttatgagcgatggttactttgcttatccaaacccatccattcacaaaggccttgaaaacatctctgacttggcagggattgaaccgctcggagccgatcatccatggatcacagagcaggtagagcttgtgaaaaaaatccgtgccggttttgaagaggacattgtagccatctacaacatctttgctccggtgacctacttcaaatggttggtcggagaagtgtcaggtggagatgacttgatcgcaaactttatcgatcaagatgcagcaactcttaaaaaagtattggataccattggtcaagatattgcaagtttgagccaacgcatcattaaagaagcaggagcagacgggatctacctcagtgttcaaagtatccaagatgcgcgcgtgagccaagaagtttataaaaatattattgcaccgagtgaactccatgtcttagaagtagccaatgaagcaggtggggtaaatatccttcatatctgtggctacgaaggagctcgcaatgatatccatctcttcacagactacccagctcaagtcattaactgggcagttggaccagaaggaatcagcctagcagaaggacgcgaaatcttcggtggacgtacggttctgggtggctttgaaaatggcaaaactggtcttctctatacaggagacaaggctgcgattcaagcagaaaccaaacgcatcatcgcagaaactggaaccacaggcttggtcatcggtgcggattgtactattccaagtgacattgatgaagagcgaatcgaatgggttcgtgaagctgcagcagaataaggaaaagagaaagagagaaaagagagtatgagtaaaaaaacatggattatcggtggggtagccgttcttgcccttgcaggtgcaacgattattggtcgaagcttgaaccacgcaaacgacagcaaaggatcaacaggatctaataaagtaacaaccttgaaagtagcccacacgcaaaactatgtgccttatgatttcgttgatgaaaaaggagaatcagatggctatgaagtagccgttctcaaagccattgacgaaaaattaccagactacaagtttgagtacactggaacaagtgacgacgacctcttgattggtctagaatctggtaaatacgatatcggaaccaaaggagcttggtataccgcagaacgcgccaagaaatttatcattccaaaagaaccaatcggagcaagtatcattggatttaccgtacggaaagaagatgcggataaatacaagaacatcgatgacttcgcgaaagaaaaagggaaattggttccaatttcaccacaaaatgcgcaatggaatgttattaaagaatacaatgaaaagcataaggaccaacaaatcgaattaacagctgctgaatcattcaaagtcgcagatgcttatgcttgggtacttgaaggtcgttacgatgccttctttgacatcaaactttcctttgaaaaagctgtcacagataaagatggttcttaccaccaatatgcagacaaacttagctggtttgcctacaaaggaattccaacttatccattgatccataaggatgagaaaaacgaaaaatttgcggaagcctacagcaaggccatcaaagaattggaaaaagatggaacgcttgcgaaattgtcgaaaaaatatttcggtgaagatgtcttcagttatgtagataaagaaaaataaaatgaaactgggtgcgtattgccccagcttccttatttctatccggatacagaaaggaaaagaaacatggtctcatacgacatttccaaggtctggtcatttcttccaaccttggtccaagctctaccagcgaccctagctttgatggtgttaacgacgcttctcggttctgcatttggcttggttttgacttgggcacaagtatctgaagataaggtaggagcaggtctggcaaaaggctatgtctttactttgcgttgtacccctccgattgtcttgctcttcttggtcttttacgggctcccccaatttttgaactggtggttgggcattgacattgatcactggtccaagtttgtctttgtccttgtggccatgtttcttctctttgccgcgatgatctctgaggtcttcaaggcagcctatttggccattcccaaaggccagatggaggcaggcttgagtatcggattgacaccagctcagaccatttggcggatcgtccttccccaagccttttgtgtggctcttccaaatatgacgacggctatcttgaacctcatgcgcgatgccgctttggcttataccattggctttatcgatatcatgggagcaggaaataacttgatcagccgcaatcttgggaattattccctcgagacttatacagccgtagcagtgatctactgggcaattgcccttgtgatctccttctccgctcaactccttgagaaacgactcagtgtaacagaaaggtagcttatggatttcaattttattagtaaaacatttctagccaccttgggtggtgttccagtgacccttctgatcatggtcgtatcgattctcttgagttttcttccagccctctttttggcactcggtcagatttataaggtcaaaggtgttcgcagtttctcagtgatttacttagcctttatccgcgcgacacctccgattctcttgattctcttcttttatagtctctttcccagcctcttaaatagcttttttaagagtattggtagtcactttaatgtctttgagatcaatcccatttactatgcctttatcatctttagcttgatgacaacagggagtcttgctgaaattctccggtcagccattctgacggtggataagggccagctagaagcagcgcaagccattggtttgaccaatcgccaagcctatatccgcattgtttttccacaagccttgcgttcagcccttcccaatttgtgtaacttggttatcaacttggtcaaaggaacctcccttgtctttgtcatgaccatcaaggatatcaccgccattgccaaggtagaagcttcttatggctatcaatattttgaatcctatctagtgatttttattctttatattgtcatttgtggggtgattcagtggggattcaatcgcttagaaaaacgcctgacactcgcatagaagaaggagaaataagaagatgttagaagtagaacacgtatcgaaaaaatttaaggaccaccaggtcctggtagatgttaatctcaaggtcaaccaaggggatgtcgtcgttattttggggccatctggatcaggaaaaacaaccttccttcgctgcctcaaccacttggaaaaggcagatacaggccacctaaccttaggtggaaaagaatatgacctctcaaaactcagcaaaaaagagattctagaaatccggcaaaagacagcctttgtcttccagcattacaatctctttgccaataaaacagcgcttgaaaatatcctagaaggactggttgtagctcggaagattccaaaagaagaagccatccaacgggcagaatcagcccttgaaaaagttggtctcctcgcttacaaggattactatccttctcaattgtcagggggccagcagcaacgaatcggaatcgcgcgtgccatcgcagtgaaaccagacgtgatcttgctggatgagccgacttcagcgttagacccagagttggtcggtgacgtcttagatgtcatgaagcaattggcccaagaaggagtgaccatggttgtcgtaacccatgagatgggctttgcgcgtgatgtagccaaccacgttatctttatggatggcggacacatcatcgaagaaaatgaaccgcatgaattcttcaacagtccaaaggaagagagaaccaaacaattcctttcacggattttatccgatgccacttatagcgtcgaatatatgatttaacaggagacacacccagtaagggtgtgttttttagaatctggaaaaaattcttaaaaattgggtcattttttaaaaatcattacgaataatataagtgagagggaacatatgactgataaaaaacaacgattaatgctactattcttactgactttgtttctaggaggctgcagtctttttacagataaagctgctgagagaagggaaatgattcagatagcagaaagcacgaaaatggagcgagcgataaaacacttgttaatcagtatcgatcctaaagctttcacttcagaaggagtcattcactcctataccttgataaaaggtgaattggaatacaatccaatgggaggcatgaatgtatctctcgttatcaatggcgataaaaagttaacgatcgatacgactgttcaaatggaggattcaggacagttcgaagcaggtagttacggtatttcagcaagattagatgatctgttaagtaaagcagaagagactgggaaataaactcatttaggtaaatacccctaatctaatatagttaaatagaaacatttatggatcaaaaccaatatgttacatcaatagctagtgcttgtaacgatttggcaacattttttaacaaaagtaacatttcaggtatgaatagaattttgtataaaaaattctaagaaacctgaagaaagaatgggaagaagatgaaaaaaagtaaatttattgtgttgataatggtagtatttagcctgagcttaggaggctgtagcttttttaatggacaatctgccaagaaacaagaaatgattcaaatcgcagagagtaagaagatgaaagtggcgattgaaaaatatttaaaaaaactagacccggaagcactgactccaaatggaaaaataaagacttataggattttaaaagataaattaaaatataatccaatgggagggctgattctagaggtagtcattaacaatgatgatacattaataatcaatatgacagttcaagaggaagattcaggggaatataccgttgcagcgtctggaatgccaaaaaagttaacgagactaataagaggagaaagtgatggtcattaattctaatttttcggatcttcaacatcagaaaacatccttattagaatatcaaccgttagaaatggggcaagattattctattaacgatggagatgattatattggtaacttagctcatatctatgatagtgtaaatggtaatgaagaacaggtcttcgtactaacggatagtggcaagggtgttgaacaagatccagtcccctatactgcttctgatgaagcgcgtgcccaaatccatgacgtgacagtcttgatgaagggatctgaaactgaaacaagtacacaaaaattactccatgatacatttacggattgggtaaagacagatttgcctgctgcttctaacattcttggtcccaatggagcggcgaactatgcgacagattatgcgaaaagattcaccagagataagattaaggagaatttgaaaaaaagggatgaaactgccgattataatatttcggagcttattagttatccgtttagtttactcgataaaaatgttggaaataatgtaaaaagctttgtcaagagtattagaagtaatccaataacaaatgcttatcgtgaggcgaaagcaaatctatatggtatgggaacggatattctaattgatagtcaagcaaagtttccagtatttattggggctaccattttaaaagagtacaacaaagatagaggtactttcccgcctccgcaatttaaagatgctgcagctcatttgaaagaggtgatccgaaaataccctaatgccaagatcgatctatacggtcactctctggggtctatgaatattcagtatgcgcttgcctgcttgacggaagaggaagcttctcatattgggactgtccatctatacaatggtcctaatgcctattccatcttaacacccgagcaaaaagcgcgtatagattcgctgaagtacaaaatctacaatcacattgaccataaagatttggttagcttgggctatcaggattctggaagcaaggaatccagtgggattgtcaagcacctcaaaactaagaatttgataaatactggcctgcagcacatgatgcatggttatatctatgataaggatgggaatttggttcttgaaaagggaacggaagccatcactcgcaaggaaatcattgaagagcggatgaaggtttactatcgcctaaaggataaattacaaaaaacaggtgatggactgagttcaagtgaacaaatctatctcgatgccttgcaggcacgcttggcttctgatgagctgattcgagtagtggatgaagggctggagcaagctcagaaatctaaggcacgactggatacagatttagaagctttggagaaagtattacagaccgttccgaaaggcttcattctcaatcttgccgaagtagaagaggcctatgcacaggctggtgcaacaaggcaaacagttgtcactcaagtaagagaaagattcgacaaccgtttggctgcatatcagtccttatctaatgaattccatgctttaaacaagcaagtgaatgcaggaattgagctcttaaaaacaaaagatcaagaaatagcaggagaaatgaaccagtgggaacaactagcttattaatttcatctactctttcgaaaaaggaaaagaaactagatcacttggaaagagagtttcaaaaagcgcgtttggagctagatgaaaagcgttgcctagtggaaagaaaacagcagctcttcacccagatgctggaagaagagtatgcgatggcagcttccttcttacaagagcaggaggttgatgtcaattgtggatgggagtccctccatcgctgtatcgaagagtatgatctcgaagctagagaagctgcacaagtagccttaaaacagatcgaaatcgaggaagagaatttatggcaatcctaccggaaagatagacgccaactggaagaggagtttgcacaagataaagtttcatagtatagaagaggaggaagtatgggtgatagtccagtcaaagatttctttgatttagatatgaaagataaaatgaggatcatcgaaagccgaaagaaacttgaaaaagatttaatccgtgttgtctatgcgcctgttttattgacctgcaaggcaggagttgagaagcgttacaatgaggaattgactgcgattgcaacagtagccgaagaagacgtccaggtagttggaaaacaactggatcagtccatggtggggcaatttgctaaaaatgtacagacagttattcaagaaaaagctgggaaatttaaatctatctagccaagaacttctatttaaaatggaatctggagtgactccagatttttttaataaatttaaaaaattatgtaaaaaagtgttgacaaataattcagtctgcgttataataatttatgtaaacaaaaagaggttgaaaaaacctactggtttacaagatcaatagtggaaaggagatggtgatatgctatttccaaaattaagacaactaattgataaaaggggaaatagaaactgttagcctgtagggctattattaaataaatgaattaaaattatgtaaacaattaagcagcagccaattggtctgctaattttcaagaatgaattaaaattatgtaaattagaggtatacaatatgaataacaactttaacaatatggatgatcttttcaatcaactaatgggaaacatgggtggttttcgttctgaaagccgtcgctacatgatcaacggtcgtgaagtgacaccagaagaattcgctatttaccgccaaactggtcaacttccaaatgaaggaagtgagcaagtgcaacaccatcaaggtaaaggaatgaaacaagatgggatccttgcaaaacttggtcgtaacttgaccgaagaagctcgtgaaggaaaattggatccggttatcggacgcaataaagaaattcaagaaacggctgaaatcttgtctcgtcgtaccaagaacaaccctgtccttgtaggggatgccggtgttggtaaaacagcagttgtagaaggtttggcacaagctattgtgaacggggatgttccagctgctatcaagaataaagaaatcatctcgattgatatttctggtctagaagctggtacgcaataccgtggtagctttgaagaaaatattcaaaatcttatccaagaagtcaaagctatgggaaatgttattctcttctttgatgaaatccatcaaatccttggtgcaggtagcacaggtgatggtcaaggctctaaaggtcttgcggatatcatcaaacctgctctttcacgtggggaattgacagtcattggggcaactactcaagatgaataccgtaacaccatcttgaagaatgcagctcttgctcgtcgtttcaacgaagtgaaagtcaatgctccatcagctgaagatactttcaagattctccaagggatccgtgatctttatgaaaaacaccacaatgtcatcttgccagatgaagttttgaaagcagcggttgattattcgatccaatacattccacaacgtagcttgcctgataaggccattgacttggtcgatgtgacagctgctcacttggcagcccaacatccagtaacagatgtccatgctgtggaacatgaaattgaagaagaaaaagctaaacaagaagctgcagctgctaaagaagattacgaagcagctcttaatgcaaaagttcgtatcgaagaacttgaaaagaaaattgaaaaccatacggaagaccataaagtaacagcaacaatcaacgatgtggccgaatctgtagaacggatgacgggtattccagtgtcacaaatgggtgcaactgatatcgaacgtttgaaagatatgggtcaccgtttgcaaaccaaggttatcggtcaagataaagccgttgaagcagtggcacgtgctatccgtcggaaccgtgcaggatttgacgaaggtaaccgaccaatcggtagcttcctctttgtaggtcctactggtgttggtaagactgagttggctaaacaattggctcttgatatgttcggaaccaaagatgcgatcatccgtttggacatgtcagaatatagcgaccgcacagccgtttctaaattgattggtacaactgctggttatgttggttacgatgacaatagcaatactttgacagaacgtgttcgccgtaacccttactcaatcgtccttctcgatgaaattgaaaaggctgaccctcaagtgatcacacttcttctccaagttttggatgatggtcgtttgactgatggtcaagggaacactgtaaacttcaagaacactgtgattatcgccacttcaaacgctggctttggttacgaagccaacttgacagaagatgcggataaaccagaactcatggatcgtttgaaaccttacttccgtccagaattcttgaaccgtttcaacgctgtcattgaattctcacacttgagcaaggaagacctttctaagattgttgatttgatgttggtagatgtcaataagaccctttctaagaaagaaatcgacttggcagtgagcgatgcagccaaagaatatatgactgaagaaggttatgatgaagtgatgggagttcgtccactccgtcgggtagttgaacaacaaatccgtgacaaagtcacagacttccacttggataacttggatgctaaacatcttgaagcagacatggaagatggtgtccttgtgattagagaaaaagacacaaagaaggaagaaaacactgataaacaagcagactaaggcgaattagtttgtgaaaaatagaggctgctatcatatagcagtctttattttttcttcccacctgggggaaattattcgccgtataaggccaaaatcctcctatttggggtggaaaaacatcaataattagtgaaattaatccaatttgagcaaaattattaataaataaagaaaataagtatataatctatacaagaataaaatttgaggaatggaagtaagatgagcaatacaattgatatctactcaactcccgaatacagaaaagtggaagccgttgttcaactgatggttgacggtcgcttgacgagctatcgtgtcgcaactgaaacaaacatcagcaaaatgagcttggcgactttgacgaagggaacgagtaaaatcaaaaatattacctatcaaacggctttggccttgattgattggtatgatgagaatcatgaaaagtatggcattacgattgactagtcagtagcccacttttcgtggtttttttctttttcagcaaaacttgcctcctctctgagactggagtctgattttacttgaagaggatgggaaaacttgaaaagacgggcgaaatttgatatagtatagcatatatgaaaattaaaggagaaacatatgcaaggcggaagtttgctaattatgctcgttcttatggtcggtttgatgtacttcatgagccgtagccaaaagaaacagtaccaaaaacggatggaaagtttgaataaacttcaaaaaggaaatgaagtcatcacgattggtggcttgtacggaaccatcgatgaagtcgacacagaccgcaagaccgttgtcttggatgttgatggtgtctacctgacctttgaattgggagcgatcaaaacagttcttcctgtatcagaagggatttcagctactgctacagaaggtgctagctcagatgccgattcagccatcgaagaataatcatcaaagaagaggcaagggcctcttttttggtgggcaaataggacgatgtgatgaaggaaagtcctgctggttcaaaaaagaggccagagtccctattttatggggatttatggtataatgaagcgataaatattgaaataggtagaaaaacatgtttcgttttaagaaaaaagaaaaaatcgagatacctttagaagtcccgaaacacattgggatcattatggatggcaatggtcgctgggcgaaaaagcggatgcaaccgcgtgtctttggtcataaggcggggatggaagctctccaagaagtgaccattgcagcaaaaaatatgggggtacaggtcttgacggtctatgccttttctacggaaaactggacacgccctgaagatgaagtcaagttcatcatgcacttgccggtcgaattttatgatcgttttgtccccgaattgcatcgcaacaatgtcaagattcaaatgatcggtgataccaagaaattaccaaaagaaacgctggaggctttggaaagagcagaagcgatgacccatctcaatacaggcttgatcctgaatttcgcgctcaattatggtggacgtgctgagatcacccaggccgtgaagcagatcgcccaagaagtcttggatgcgaagtttagcccagaagatatcacagaagagatgatcgctgattctctctataccgagagtttgccacgtgtcctaagggatccggatttgattattcgtaccagcggagagatccgtttgagtaatttccttccttggcaggctgcttacagtgagttgtatttcacagatgtgatgtggccagattttggagaggaagcactacgaagtgccatagtagaatatagccatcgccatcggagatttggtggtgtttaggagaagatgatgacgaaagatttacaaaaacgtgtgatttttggaggaattgccctgctctttttcattccaacagtaatggttggaggggtgttcttccagattgtgattggcttgatcgccatgctaggggttcatgaattgctcaagatgaaggggcttgagacagcgacttttgaaggagcgctagccatgttagcggccttcgtcctgactttgccgatcgaggactacctcccttaccttccagcagatggcaatatgattgcctatggtctggttgtcttgattctcatggggacaactgttcttgctcagaattacaattatgaagatgtggtctaccccattgcgtctagcttttatgttggacttggtttccattccttagtagatgcgcgaatcgctggtattgataaggtcttattggcactctttattgtctgggctacagattcaggtgcttatctggtaggaagtcggtttgggaaacgcaagcttatgcctgcggtttctcctaataaaacgattgaaggcagtcttgggggaatcttgtctgcagttgcggtaactgtgatctatatgatcgtggatcgttctgtggcgggtggacatggttttcttgcgatgatcttctttaccatcctctttagtattgcaggtcagtttggagatctggtagagagtgcgattaaacgccacttcggtgtgaaagattctgggaaatttattccaggacatggtggtgttctagaccgctttgatagtttgatttttgtctttcccttgatgcatttcttgggcttgttctaagacagaagagatagaaaggaaaccacgtatagaacgatgcagtttattgcctttattgttatttttggagtgatcgttctcgttcacgagtttggtcatttctattttgcaaaaaaatcgggcatcctggtgcgagaattctcgatcgggatgggtccaaagatctttgcccatattggtcaagatggaacagcctatacgattcgcattctacctttaggtggctatgttcggatggctggctggggtgaagatacaactgagattaaaaccggaacgcctgtcagcttgacgctaaatgaggctggcaaggtcgtccggatcaatctttcgggaaagaatctggatcagacagcccttcccatgaatgttacccagtttgactttgaagacaaactagaaattactggcttggttctcgatgagaccaagacttatgatgtcgatcatgatgcgaccatcgttgaggaagatgggacagaggtgcggattgcaccgagagatgttcagtatcagaatgccagcatttggggacggttgatcaccaactttgcgggtcctatgaacaactttatcctcagtattgtcgtctactcacttttagcctttatgcgcggtggtgcgattgactactacagcaacaatgttcaggtggcacccgatggggcgctggctaaggtcggtgtcaaaagcaatgttcagatccttcaagtcaacaacgataccgttagcaactgggatgagctgacagatgctgtcgaaaaagcaaccaaggacagcaagacggctcctgaattgaccctgaaagtcaaaacagacggccaagaaaaagaagtcaaagtgaagccaaccaagtcagggaatcgttactatttgggtgtgacaaatggcctcaagacaggatttatggataaactcttgtctggttttacagatacctggaatacagcgacacggattttaggagctttgaaagatatcattttccactttagtctcaataaactgggtggtccggttgctatctacaatgccagctcacaagctgctcaattaggaattccggcagtcttgtctcttatggccatgctctctattaatattgggatcttcaatctaatcccgattccggctttggatggtgggaaaatcttgatcaatttgatcgaggtcgtccggagaaagccactgaaacaggaagtagaaacctacatgacgcttgcaggtgtagctgtaatggttattttgatgattgctgtcacctggaatgatattatgaaattatttttgaaatagaaaaggatattgtccatgaaacaaagtaaaatgttgattccaacgcttcgcgaaatgccaagcgatgctcaagtcattagccatgctttgatgttgcgtgcaggttatgttcgccaagtatcagctggtgtctattcgtatttgccactagctaatcgagtgattgaaaaagcaaaaggcatcatgcgccaagaattcgaaaaaattggagcagttgaaatgcttgctccagcccttttgagtgcggatctctggcgtgaatctggtcgttacgaaacttacggggaagacctctataagttgaaaaaccgtgaaggttctgactttatcttaggtccaactcacgaagaaacctttaccgctattgtgcgcgactcagtaaaatcttacaaacaattgccgttgaatctctaccaaattcaaccaaaataccgcgatgaaaaacgcccacggaacggtcttcttcggacccgtgagttcatcatgaaagacggttatagcttccatgctaactacgatagcttagatgtcacttatgatgaatacaaggcagcttatgagcggatcttcacccgcagtggcatcgactacaaagccatcatcggtgatggtggtgccatgggcggaaaagatagccaagagtttatggctgttacgcctgctcgtacagacttggatcgttgggttgttttagacaaatcagtggcttcctttgatgagatcccagcagaagtccaagaagaaatcaaagcagaattgctcaaatggatggtctctggtgaagataccattgcctattcaagtgaatcaacctatgctgcgaacttggaaatggctactaatgaatacaagccaagtaaccgtgttgtagcagaagaagaagtgaaacgcgtagaaacaccaggtgtcaaatcgattgatgaagtagctgcattcttgaatgttccagaagaagctactatcaagactttggtttacatcgcagatggtgagcctgttgttgcccttctcgtaggtaatgatcagctcaatgaagtgaagttgaaaaaccacctcggcgcagacttctttgaacctgcaaccgaagtggaagtgaaagaattattaggagctgattttggctctctcggtccagttgatcttcctgaaaatgttaagattatcgcagaccgcaaggtccaagacagccgtaatgcagtagtcggtgccaatgaaacaggctaccacttgactggtgtcaacccaggacgtgactttactgcagaatacgtcgatatccgtgaagttcgtgaaggcgaaatctcaccagatgggaaaggggtcttgaactttgcacgtgggatcgaaatcggtcacattttcaaactcggcacacgctactcagctagcatgggagcagatgtcttggacgaaaacggtcgtgcagttccaatcatcatgggctgctacggaatcggtgtcagccgtcttctttcagccgttatggaacaacatgctcgcctctttgtcaataagactccaaaaggggagtaccgttacgcttggggaattaactttcctaaagaattggcgccatttgatgtgcatttgattccagtcaatgtcaaggatgaagcgagtcttgctttgaccgatcggatcgaagaagccttggtgaataaaggctacgaagtcttggtggatgaccgaaatgaacgcgctggtgtcaaattcagcgatagtgatttgattggacttccaatccgcgtaacagttggtaagaaagcagctgaaggcatcgttgaagtgaaaatcaaagcgacaggagataccatcgaagttcatgcagacaatctccttgaaaccctttcaatcttgaacaaataagaaaaagctttctgagctctcaccagtgtggtgatgaaactcaggaagctctgtttatttttcttctttgaggccttgatctttgaaataggtaaagagatcttgaggtttgccattgaggtatttcttgaactcagctgtttcttcctccccttgatccccgtagatggaagcaaactcatctttcttgatttttgagaagtcagcttgtaagaccttggcataggattgtttatctttcgaaatttgaatgcggaagctaagaccaggcttgccatttaagcttttatagatatcgctatgttctaattcttcttggtagatttcctttaactcggaaagatccatgtcttgcaaatctgaggaaatgggttcaaaactaagaaaagtaaaagagacaatttcatcttttttgtagccgatttgaattttgttttgatggtgatcgttaagttctgtggagaaagttttggttcgaacgttctcttctttttcttttttcacttgggaagtgctttggctagatgttgttgaagcttttcctttttctgcttggccttggctacatgcagtgagagctaggaggcagatagaggtcaataatatttttttcatagaaactccttataggttaatggtgttcgatcttgtatgaaacaagttttgaacaggtttcattataccataaaagttttaaaaatgaaaaaatatacaaaaatcttcaaaatttgcttttaaaaacacctaaaatcaacaattttaatctatgtgtcgagttaatatgaaaggacagagtgtcttcttttatttccggaaataatactagttggagactactggggcaaggaattcagaaaatatattacatgtttatgacaaagtgttacacaattgtaacaaagttacaatgttttatcagttagccctctaaacttgacattctggcaatatttcattaagatatttttaagtaaataatacaaaaagggagcaaaaggtaaaatatacagttatctggcattttactaattcgtactaaaatgtattgtttatggaaaaaatataagggtatcagcccaaaaggagaaacatatggctcaaattaaattaactccagaagaactacgtcaatcagcacaacgctatgcacaaggttctcaagaaatcgatcaaatccttaacactttgactcatgaacaacaagtcatcgacgcaaactgggatggatctgcatttgatagctttgaagcacaattcaacgaattgtctccaaaaatcaaacaattcgctcaattgttggaagacatcaacgctcaattgatcaaagtcgctgatatcgttgaacaaactgaccaagatatcgctgcacaaatccactaagatagtcttggaggtgatcttacttcttgtaggtagatcacccttttgtcttttgatatatagaaaataggggttagattcttaattcctaacccctattttgtatctatgaattagaaaaaggaaaaggtatggaagttaaaaataaaaaatggttaaaatacatcggtcagagtgcggttgtgctccttttgatgggatctgtagtgggtctttatacgacggttcaaaagaaccaaaagcaaaacgaagcaaagaccgtgcaaacgacagaaaacactaagctcaacattgcggttgtcaatgaagacaaggcggtcaaactgaatgataaagaatacaaccttggggctagctatgtaaagaatatcgaacgggataattcgcaaaactggtctatactccctcgtggagccgctgagtcagggcttgcagatggcaagtaccagttgatgattgtcattccaagtgacttttcagagaaggtcttggaagtgaacgcggttaatgcagagaagaccacggtgacgtataaggtcaatgcggctgggaattctcaggttgaaaacgaggccaataaagtcgctaaagatatcgtttcagacttgaatagccagttggttgatatgtatatggttagcattttgagcaacctttatacagctcagaagaacgtggaaacaagtaacaaaatccaatcgaccaacattggttcataccgaagcaacttgctggattcggccttggattccaagaatatctttccaagtctctatagcttgtctacgtcttctgtcgagtcgaataatgccttgaagacagtccttgagtcttatacacaggcttttgatcaattgacccaatctcaggatcagtacggtcaaaacttcgacacattgatcaagcaacgctctgaggataagatcagccatgaagagttcatgaaccagctgatgtctatgaaccagtctgttatcagtgaaaagacccaagagttgtataagaatctacaacaaaaccaagaagcaattaccaaacaattgagtcaaccaactgaaacagaaggagatgcttcagggaccaagacctatgcaggcttgacaaaagatgtgaatgatcgtgtggcagacctcgaaaaagggatcaaggcagaacgcgacaaattagatgagcacgaaaagaacatcgagtcttctgtaaaaacgaagatccttgactactatggtctaaaagaaggagacaaagtcactcttcgtaccttgcttggaaaaccaaaaatcgaaactatcagcaaggctcgagataaagcggatgatgacattcgtcaagcgattgaaaaacttccgtctttagaccctgctagtctgaatttgaataagtatgggaatctcaacgcagcgattaattttgatagtgcttttgctggtacgaaggggcaggcaaaagggaatgccgatgaattaaaacgattggctacagaagtggatgccaaatcaacggcagttgcggatgtccttaatgctaaatctgggaaacagaaagttagtattcatgtccctgcaggagtcaaggttgatacttggacctatgatggacagacttatgcaggtggtggtgagcaggaagtcgaactgaaagatggcaaacaaattcaaattcacctcgttgaagatggaggagctatgccaagcgcgattgatgttgaagttcttgtgaatggagtttcttcaaccagtgtgaccgtatctgcagatgatttgaaaacagctgtagctaactatgcatcgaaagctagtgaaatcgccctggattatcaacgtgcgggagcattgatcgatgcctactatccaaaagatgacaagggagatcgtcattcgctctatgatccgatcgaagatatggatttgacaaatgctttggtcgatgtcgtgaaggctgccgtttcaagtaacatgaaggactaccgtaagagtattgaaacggatgaatctggggatgcaacgaagagtgtgaaagcccagttagatggtacactccaacagttgcaagacttgggaccacaattgcaggccaatcttcaagcaatcgaaaatactaacaaagatctaacccaaaatatcaacgatcaattggcacagtatgcagaccttcaaaaacgcttagaagctatctcatctgcacaagaaacagtgacacaggctcaaaccaagaccgatgcagatttgtcagcccttggttctgaatacacgtcattattgagctcgacagaaggcgttaagagctcatctcgtagcaatgtagaagctgctaactctaccaatgaaatctttagccaattgaataaagaattggaaaaagctcaaggcaatacagagaaattgtctagcaatgcagagagcttgatgggtgaattcgacaaggaattgtctgaaaacgggaacttcgtcgaagccttccgtaaagtcttcaacaatgcctatgaaaacggagtaccaaatgaagtcctgctcgactttttgtcaaatccagttgcagagaaatcgtcttctgtgaaagcgactatcaacgtctaccgtccatttatctggatctttatgttggaagtcttgagcctcttcacagcttatctctttgcgactcaaccaatcattcgcaaggttaaggatcgtttcaaactcgatcgtttgcaagaatcagatctcttgtctgtcggtgttcttgtgggactttctctcatccttggactggtgatcggaatgatttcaagtattcaactctctgttggtcgtgaatatgtaccttcatgggtattcttagcggttctagcaagctttgtcttggtacaactgcaataccttctcttgaaacacttccgtgtgattggaatgggactggccttcttcatgttgatcagctatgtctacctatcaagtgcgatcggaacgaccgcgaccttgtcaggccttccagcactggtgaaaaatgtcaacctcctttctattttagaaggacagtttgcgggttactttgatggacaaacagccggtatcggcgtcttcttcggattgttggtcttcttcggccttttgacagttgccaatatcttcattcctaagaagtttactcaaacaaaggaaattgaatcaagcttatgaaaaaaatgatgtatcttctctttgtctttagtctcttaccagtagctgttgtttctgcagatgattttattgataatcgtctgcaggtcaacaactcacgtcttgagacagagcaggaaaagacacttgggggccaattggatgcgactgagtctcttttcaatgagaaggatcagaaaaaattagcagatgaaaaacgcaagcaagagaaacaattgaccgattctgacggccagttgttttctgctataaagggaaagaaaaaaacagggcctgaagcggacctgttccagcctgaaaatcaaaaattatctaaattcgagtccaatgtggaggacaattcggccagcttgtcggattttattccagccttgcaaatgctggcttggagtgctcttctctttgggattgctggctatatttcctatcgaatctatagaaaagaggcctaaatggaccaacatatcaatgtcaccttccgtatgaatggtgcaagccatgacctccgaatcccaacgcggatggaggtgcgacgcttgattcgggaattggatcagatctttgggtctgccatggagcctagaagcaagtatcagttgcgcgtggtaaataaaggcatcttgctggatgaaggcaaggtggtacaggagtatccgatcacgagtggtgatctgatcgagattgaggagtggtaaggtgaaagaagaacaatttacactggaagaacaagtcttccgttttgaaaaagaagaaacgagctggcggctggaccttaagcgttcagaagtggatagccaggatttacgcaatttatggattttggatctccatcatcccttgtttttagagcaaagcatgacagcggatcaagaccagattcatctgacctatcagacagacgcgctaggcttgagtgcagaagaaatccaggcattaccggtttcagaccgtctgcgtctagctatcaatgtcttggatttggcgccagccttggagcttccggtgacctttatgttgcatcctatcaatttgtttgtgaccaaggatgcgcaagtcaagatcgcttatcgcggggtgccgggaatgatggtgccacgcaagtgggatcaggttgaattcttgcggcaggccaagtgctatgcggtcactctttttggggactgggatttcatggagctctatcaaggcacacttgaattagaagatctgcctgatttcttggtagaaatccgtgatgctgctagcttagaagagatgaaagctctcttagagaaagcctaccaagaacgcaaggaagaggaagaaaagaccttgaccttggtttcaagtcgtcaacaccgaatctttaagttggcaacagtatggctttcagctgtagtggccctcttactcttgcccttgatttatttggtctttttccaagccccctttaaagaaaagttgcttcaagcggatactgcttttcttaaagtagactacaccggtgtgatcgatgagttggagggagtggctccaagcagtcttccaacgacacagaaatacgagttggcgacgtcttacttgcaaggcttgaatttctcagaggaccaaaagaaggtcatcctcaacaacgtcacgctcaaatcagacagtctctatctccactactggatctatatcggccgtcatgactttacccaagcgctggatacagccaagcggatcgacgattcagacttgatcatctatgcccttcgtaaagaaatcaaggcgacacgtgatagcgaaaaactctctggtgaacagcgcgagaagaaactctctgagctagagggcgaatacaagaaatactgggatgcccgctctaaactcttggaagcagagacagatgaaaccaaagcttccactagcagctcaacaacggcttcgtctacagaaggttcctcaacagaaagctcgtcttctacaactgcaagctcgactgagtctagcgaccacaaggagtagtctatgaaaaaacgtatcatactctataaaaaaggttttcgctatgagctagcgctagaagagggaaaaacagcgactgtatcgaatcaagaaacggctcagttgaccatttcttcgcaagaacatcctcttcatttccaatggagtcaaggagaagtcttctaccaatatggggaagacaagggcgtgcttgaaaatagcaagatccttggagatgtggtctgctacttggcgataggggaagtccatacctatgagctactcgacaaggaagagatcctggtagcagatgaagagggtgcggatgtgcgcgtgcattatccagtgcgctttctccttgtgaaaaaagaccagatctggacttgccagctcttatctggaaaactctaccataaccacaaactcgtcagtgaagcgacttttccactggcctttggggatgagcttgctattggagatgtgacctttaagctctatccggaagaattttgtgtggaagggactgtcgaagtgagtccttatctggtgccgcgtttgcattcacgctatgacttctacaaggactatccagagtaccaccggtctccgcggatcatctaccggagttcggaagacaagatcttgatcaatcctccaggagcggagcctcaaaagccatcggatgaactcttgaagttgatcatgccacccctcatcatggttggggtgaccctcttgatcaccattttccaaccgcggggtctctatatcatcgcgacggtatccatgtctgtggtcagtgtgatcttttcggtccaaggcttcttcaagaatcgtaagaaatacaaagaagacaagaaagagcgcgtggagctctaccatctctatctcaaggacaaggctaaggacttggaacagctatctcggaagcagcgagaaggcatgttttaccatttcccagcgattgaagacttgacaaagatggtcaaacgctatgattcgcggatctacgaaaaaacaccgcttcattttgattttttggcctatcgtttgggcttgggcaaggttccaaccagctatgagctcaaatatggtcaggaagagcgcagtgggaagaaagatgccttggaagaagaaggctatgcccttttccaagctcaccaaaaaatcgacaatcttccgattgtagctagccttaatcggggacctgtagggtatgtcggtcctcgtcctatcgtgttagagcagttgcaactcctggttgcccaattggctgtctttcactcttaccatgatctgaccattattccgatcattccagaagaggaaaaagaaagctgggattggatgcgctggttacctcatgcaactctgcaagatatgaatgtccgtagctttgtctacaatcagcggacacgcgatcaggtcttgaacagtcttaaccaaatcctcaagctccgcaaggcgcaaaaagaggaagaaaaagccaatgataccaagatcttccacccgcactatgtggtcctcatcaccgatgaaaccttgattttggaccatgtcatcatggagttcttccgtgaggatccgacagagctaggatgctctatcatctatgtggcagatgtgctctcatctctttctgaaaatatccaaaccgttatctccatcaaggaccgcaaccaagggcaattgctcttgcaagaaggggttcttcgtgagcttgacttccaattggatcacttccctgaaggttatgacaaggaagccatctcgcgtggccttgcccctctcaagcatatccaacagcttaagagttcaattccagactcggtgaccttccttgaaatgtaccaggcggaaacttttaatgacctcaaggtcttgagtcgttgggagagccatgccccttaccaaagtttggcagtgccgattggtctgcgcgggaaggacgatttggtctacctcaatctccatgaaaaagcccatggaccacacggtttgattgcagggacaaccggttctggtaagtctgaaaccattcagtcttatatcctgagccttgccgtcaacttccacccacacgatgtggctttcctcctcatcgactacaagggtgggggaatggccaacctcttcaaggatctgcctcacttgcttgggaccatcaccaacttggatggcgcccagtccatgcgggccctagcctctatcaatgcggagatccatcgtcgggaacgcctctttggtcaatatggggtcaaccatatcaaccaataccaaaagaaatttaaactgggtgaagcgacagaaccgcttcctcacctcttcttgatcagtgatgagttcgccgaactcaaggtcaaccaaccagacttcatcaaggaattggtctctatcgcacgtgtcgggcgttccctcggggtgcacttgatccttgcgacgcaaaaaccttctggggtcgtggatgaccagatctggtccaactcccgcttcaagctagccctcaaggtggcagatcgtggggactctatggagatgctgcggacggcagatgcggctgagatcacccagaccggtcgtgcctacctccaagtcggaaataacgaagtctatgaactcttccaaaccgcttggtcaggagcagactaccagcctgagaaggaccagctagggatcgaagaccataccatctacttgatcaatgaactgggccaatacgaagtcctcaaccaagacctctctggtctggatatggcagaagaaatcaaggaagtgccgacagagctggatgtcatcgttcaagaaatcaaccacttgcaccaacaagaaggcatcgcagctgtggcccaaccatggttgccaccgctcaaagagcggatcacgctggatgagttggacaaggtcgtaccgatcgaggcttggcaaaaacggacagctccaagcgtcctgatcggggtcgctgatatcccgcaagcgcaaaagcaagaagcggtcgccatcgatctgtcaaaagatgggaatatcctcctttacggaagtccaggcacaggaaagaccactttcctacagacagccgcaatggatctggctcgcaagcagagtccagaaaatctgaccatgtacttgctggatttcggaaccaatggtctggcaccattgagccaattgccacatgtggccgatagcctcttgctggatcagacggagaaaatccagaaattcatccggatcatcaaccgcgagttggatcgccgcaagaagctcctctctgagcatggtgtcggcactatcgctctctaccgtgaagtgaccggcaagcaagagccaaccatggtcatcctcatggatagctatgagtctatgaaggacgagccttatgagacagacctcttcaagctcttcatgcggatctcccgtgaaggtctcagcatcggtgtgcacttgatcatcacagctagccgtcagaacaacctacgggctcagctctattcaaacttcaagcaccagctgaccttgccacagaatgatatctctgaagtccgcggtatcgtgggagcaaccccactagcgtctacgatggaagacatcaagggacgcgcgctcatgaagcgtgacgaagtcgatgtcatccagttcgccctaccagtcgcaggagacaatgatatccaaatcatcaacaacctccgcgaccaagttcaaagcctcagagagatgtggacgggtcgcaccccagcaggcatcccaatggtaccagatgagttgacagaagcagctttctacggacgtgaggatgtgaaagagtccatggaaaatctagaatttccaattggacttgactttgaaatggtcaaaacggtcaagattccatttgatcgcttgaaaaatctggtatttatggcggactctccagaatcactggaaaatcagcaaaaacatttgttaaatacagcacttcaatttggatcaaaattacatattatgctggtggatcctttagaagaatgtgttgcttataaggataaagtttctacttatattagtagtagtcaagaaatttctgaaattgccaaacaattaatctatgaggttgatcgtcgtctagaaaaagatctgtattcagattggttgatcatgatgccaactattaaggcaattgttgatcaaggacttacagaaaaagatctacgctatctatttgataatggaccacgagttggtatgcactttgtaataggaagtgaatatgcctatcttggaaataacatcaatgaagtaccgaaatatctcaaaggaaatgctcaatggtttatgatcggtatgagattgatggatcaaatgttcctagataagccttataataatcgagaagcgcgtcttgcttcagatgaaatctacttgcatgatcgcaagcaagctattaaacttaaaatcaccaagaatggatagggaggtaactatatgacaccaatacagagtagagaagaagtcgcaagttctatcgcttcaggaatagcgagtgcggcaggaagtataacatcagctgataccgtcacattagatggatcgagtgagtatccaggaaatagtacagctgcagaaaaaattccagaggaagccaactatgcagcctcaattagtggtgtgctaaatgattttgtagaattgattcatggagttgcggcagaatttgtagccatggatagtaatattgcgtccaacatcgatgccaatacatctaatttaccagaaaccagtgcagctcctggtgagagcggagagtttgtaccaaattcaggatattttgcggaataatgaaaccaatcaccttagaagagatcgataaaaagaagaaaaacattgctcaatcgctcgatcaactgaacctagaaaaaaggaaagtggaacgagcagagaaggaaatgtttgaactacatcgacaaagcttaaaacctcttcgtcagatcttaacgcttcctatatcttccaaagactaccaagtctatgaaaatctaatcgtgagtatagaaggcatcggagctatggttgaagaatggtctgaaggacgaagagcggatattaagaagcgagaaaatcagctggatgagcaattaaatgaactctaccacgctagaaagaaactattaatagaacaggagtcgaaaaagtaatatggtcaaaatggtattaagttcatcggatgcacaaggtcagaccatgtcttccgttggaaagactagagttgatgcttacaactcagcggttaaagccctctctaacttcaatggagcgagtgacttgcaagggagtgcctatgattcagggaaacaatacggagtgagtgtgattacgccactaattaaaggggcgatcatgtattctgagtacctcagtgaagctgtaccaaaactcccttcaaaatatcggtcagaagttggggacgaagatctggattcagccgtacttgaaagtgaaattcaaagcctcgaaagtagcattagtagtcttagaggtactttgcgagctatggaaggaagtgatcatgcggataagagtctcctgcaaaatatatcttctcgtatggatggtttaacgtctcaaaaaaatgagaagatggataaacttcgaaaactaaatctatttgcggggagttccaatgaagttttctcaggagaaggggaggttggcccgattaacactttaattcaaagtattcaaattggtttaagccaaattcaagcagagtttacaaattttagtggaacttttcatatgccaaaggaaacttcttggattactgatatttctactcaatgggaagagcgtgagaaaaaatctcaactagatgaggattccaagaaagcattagatagacttgaaaaggataaaaaagagggtaaaatttcaaatgatacctatcaatcattgcgaagtggaattataagtggtggagttgcatttcttaatgaattagcaaaaagtaaagttatagaaaagggcgttgaaggttttgtgaaatttgtttggaaaattttagcttataatccacaaaatacacaatatggattggtgggagcagttgcaggaggtgggacaactactattccaatcaatgttaatcctgcttatagtcaatttgttagtggtgttgccaaatacggagcaccaataattggtgcggctattgatttcacaatgcaggttaatgatggagcaaatatagttgatgcaggtataaagacaagtgcccatgttgcgattggtgttggagcagctaaattaggttcagcaattggaagtgcactggttccaggtgcaggtacagttgttggtggagcaattggttttgttgcaggagtagcagggtcgatgctcttcgacttcgtgtatgataacaaagataagattgcaaaatttgtaaaagattcttctgatgcagttgttaatactgtaaaaacaaaaatgaaagaagtgggcgatgcagtttctggtttcttcagtggcttaggttcagttttttcttagataaggataatattttacaatgttagaaaaaaaagagaatcataaacaattagtgaatttgagtaactataaaaataaaacggtctattatgatttgaggcttaataaactttatttttcattacctaaaggtagttctaaaaatcaacaattttatactctttttcttattttaataacactgccaatcgttcgattatttaataatatggatatatttggtgtgtttgtaataaaatatttaagtttgatattatttacattaatttcaatatttttaggaaatttttttgtaaagtatcagtataggaatttagacctgtatccggcttcttttagtgatattgagtatttagaatatttgcattatgaaaagaagaacttaatgctcgtttttggatatttcattgcagttatctttagtttagtaatttcatttgtaatttatttaatcattggaaattttttaagtttaatcatatattcagtattattatttgttatatatgtatgttttgctaatcgtttatatatgagaaaaagggtagtagataccttgttaaaagaaataagtacctaaagtaaagatactataaatttttattgtttcttaagtaatataattaattttaaaaattttagaatagtattaaatttaaatgaaaggaatcagataaatgaatgaagtgttgccaattggaagtattgtccaattgaataatggagaggtgaagttaatgataataaatcgttatccactttacaataaccatggagtgataggctattttgattattctggttgtgtatatcctaatggtagtttagataatcaggcatatttttttaacaaagaaaacatagctaaggtctggtttaaaggttatattgacgagtccgaagagttacttcaacagaaattcaaaaaggaaaaagataatattaattatcctcgactaagtcttgatgaataatactgatagattattaaaaaaataataaaattgaaataagataaagaaatagttatatcgtatattgaaagagacaaatagtagaacaggaattgaattgataatatggtcaaaatggtattaagttcatcggatgcacaaggtcagaccatgtcttccgttggaaaggctagaatcgatgcttacaactcagcggttaaagccctctctaaattcaatggagcgggtaacttgcaagggagtgcctatgattcagggaaaaaatacggagtgagtgtgattacgccactgattaaaggggcaatcatgtattctgagtacctcagtgaagctgtacccaagcttccctcaaaatataggtcagaagttggggacgaagatctagattcagccgtgcttgaaagtgaaatccaaaaccttgaaagtagcattagtagtcttagaggtagtttacatgctatggaaggaagtgatcatgcggataagggtctcctgcaaaatatatcttctcgtatggatggtttaacatctcaaaaaaatgagaagatggataaacttcgtaagttgaatctatttgcgggaagttccaatgaagtttttgaaggcgatgctaaaaagagcatggacacagtcgtgaagaatttggcatctggattgaatatgatacagggtgatttcgcgagcttcggtgggacattccccaaacattctggaaaaacgttgaactgggctaatagtatcgaaggtgaatgggataaaaaagccaagatagatgaagattatcagaaggtgcttgagaaaataaaagacgggaaagagcttaatgacgatgatgtgaagaagatcgatgcttataagaagcgattttcgaatagagatataccagagacagtccaattggctgttgataagcataaacaggcaattgaagataaaaagttaaaagcagcggctaaagaagtgtcagaaaaggaaggggttccttatgaggaggctttagagctcgtaggttctacagttgcagaagaacttacctcatcgcaacttgaaaaaattaaagtttattatccaaaactcgcagaatatattcaatactttgctaaaacagataaaatgggtaatgtacatatatctatgaattcaaacgtaaaaggttatactaataatgtagtaaaagagacaactaaaagtttccttaaacgtttggcttcagaggtagacattccagtaccaggaactaattcgtctgttggaatttcagcagtaagttcggcatttataggctatgattattataataatttgcaaaacgagaatgcgggacgtgcctttatgcatacggcagccacaactacatctacagcagtaggagttgatatgctgactacaggaatcttatatactagtacaggaggtagtatgttcacaccagctgcaatggaattagttggatttatgggaagtcatccagttggatgggctattatggcaggcattggaattggttatcttgcaacagtagcctatgataataattttttaggtattaaagatatagctaatgattttggtgataatcttaataaaggactagaatgggtgggggataatattcattcgggtctgaaaaaaacaggtgaatttattgattcgacattagatggcgttggcaaaacttttgactcaggtataaagtcaattcaacatgtttttggtttttgatgaggtaggaattaagtggaattaaaatttaaaaattcaagtatgacatgttttcagattgtccagttagatcaagaatcaaagaagtatatcatggatacaagtacaatgagtccaaagagttattactggggatttaaaacagatacgattacagtgggtatggtggagatcgaaaagaataacaatcagttcgaaattaagcctacaacacctgtaagtacaacaatggcagccattatcgtacaaccaattgtcaaaattggttacgatgttataaagcggctttttattaaaaacaatcttagtgagcaagtgttattaaagttattactctttgcaatttctatgcttatttcttactttgccattttgatttcattaaaggtggcccataaaaaagcagataaatggattcctaaaaacagccataaatacacagttacctttacaactattaagaaaagtaatggaggagtatatcctttggttggagcaattttcatttgtttacttttctttcttggtttgaataatggaacagaaggagcttttttggtaatcaatggaatcgtatccttattctttttcatgtttactctaggaagttatccaattgcttatccctataagcaaggtcaaattgtggttaaaaagattgaaaaattgtagaagaaaggaaataaaatgtcaatattaccaatcggaacaatcgtatatttaaaagaaggaagtcaaaaactcatgattcttaataggggtgtgactattgatcaaaatggggaaagtgttctttttgattattctgcagccttttacccaataggattaaatccagaacagttattctattttaatcgtgaagatgtggataaagttgtatatcctggttatagcgatgaagaagaggagcgatttgctgaaatctatcaacgttggcttgatgagaactcggagactattaaaaaaggtgtaacgaaatctaaataacacgatagaattttatcatcaatggtttatactgaaaatttataactattaattttagagagaaccacggttctctctttttcatccacaactttccccacctagtaactaacttgctcttcaaactaattttcggtatgaatagtagaaaatattcttaaatctaactcaatcataaaagaaggaaaataatccatgaaaaagatgctactattactggcgagtgtgcttgttttaacagcctgcactcagccgaaaaaagaggccaaggaggcaaccgcaagcaaaacggagcaaactacaaaggcttcctcgtctgctaaagaggaaaaggggttgaaatttgtagtcgcgcctcaattcgaaggaaagacatcagaattgatggaactggggaaaaagttagttaaagagcattcggaagttggcgatcaaggggatatcactgtgtattatacagggaacacctatactgtagagcaacaagaatatgcagtatttatgttggtcaataaaactacaacgaatattgaccatgatgcgacctttaaaattagctggagttatgatgggtaatctgtttaccaagatcaagtggtccagtatagtctatcgaataatcctaagttaccgacccaatcagcgactctcttgttgcttcctttgacgagtgaacaaaactcgatcgtagagaagatatcggatgaaacgaagatgagtctgagtatcacagacattataatgaagtaggtgatggggatgcctgatatcagaatacttctagttattgctgtggctgttattggatttcctttgtttgccgtactcttttttggacacttttatagaagagaagttaggattaagaccctctcgtcaaagagcgttgagggagtggtagttggctataagcgggcacaaattgtagcggctccaattgtagaatatagagtggatggtcagacctatcgaaatagcctgaaatattattgggtggtgcgggcaacacttccttggaaaacgaatcaagcggctagcgacatcgatttgatggcgcaaaggataaccatctacaccaattctacagtctcaaagggcaatctttttcaagatgcttttccactgggattgaccatgacggtctggtataatccagcctgtccaaaagaatcatacgttgaacgctatggtgggctagacaggctttttaaacggcagatgtggattggaatctggatgttaattttattgcctattttagcagttgtgtccattaccatgggaatgaagtataaatgatggatcagccctaactgaataaaagatgaaaagaaatcaccgtcctatcggtgatttttttgtcttcacttctccctcgaattaatccttaaattgtgataaaataagggttacgaatgtttttgaatggtctgtttttgcttagaaagcgggctactcaaaagtgagcaaaagaatcaagatcaagggagaaacaatgtccaacatctttgaaattttaatggatcagctggatatgccgctggagatgcgatcttccagtgcctttttgcatgcggagattcaagaagtcgtggtgcacaaggtcagtcgggtttgggagttccgatttgcctttgcggaagtcttaccgatcgctttgtttaaggaattgcgccagcgcttgaaggatgaattttcaaagacgggaaaccaggcgacctttaccatccaagtggccaatccggatttttctgcggatttattgcaggcctactatcgggaggtctttgaggaaggtccttgtgctagtcaaggctttaagggactctaccaagacttgcaggtgcgcgcggaagggcaggaattgatcatctctgggccttcttcggttgatacggagcattttcgtaagaaccatttgcccaaccttgccaagcagttggaagcctttggttttccgcatttcacctgtcgggtggagtctgatgaggagttgacagagcaagaagtggcacgctttgagcaggaaaatgaaaagattttccaagcggccaatgaagagaccttgcgggctatggaatccttggcccagatggctccgccaccagcggttgaagaaaagccggcctttgacttcaaggctaagaaagctgcggctaaacctaagctagacaaggctgagatcactccgatgatcgagattacgacagaagagaaccggattgtctttgagggtgtggtctttgacgtggagcacaaggtgacacggaccggtcgggtcttgatcagctttaagatgaccgactatacctcgagtttttcccttcagaaatgggtcaaaaatgaggaagaagcccagaagtttgacatgatcaagaagaacagctggctccgggtgcggggaaatatcgaaatgaacaatttcacgcgcgacttgaccatgaatgtccaagacatccaggaagtcgtgcattatgcccgcaaggacctgatgccagagggtgagcgccgggtggaattccacgcgcataccaatatgtcgactatggatgccctgccggaagtcgaagagctgatcgccaaggcagctgagtgggggcataaggctgtggctatcaccgaccatgggaatgtgcagagtttcccgcatggctttaaagcagccaagaaagctgggatccagctgatctatgggatggaagccaatatcgtagaggacaaggtgcccatcacctacaacgaggtggatctggaccttaatgaagcgacttatgtggtctttgacgtggaaacgacgggactttcagccatttacaatgacttgatccaggtcgccgcttctaagatgtacaagggcaatgtcattgaggagtttgatgagtttatcgatccggggcatcctctgtcggcctatacgacccaattgacagggatcaccaacgagcatgtccgtggggccaaacccttggtgcaggtcttggaggagtttcaggaattctgcaaggatgcggttttggttgcccacaatgccacttttgacatgggcttcatgaatgtcaactacgagcgtcatggtcttcccaagatcacccagccggtcatcgataccctggaatttgcccgcaacctctatccagattttaaacggcatggtttggggccattgaccaagcgctttggggtcgccttggaacatcaccatatggccaactatgatgcggaagcgacggggcgcttgcttttcatctttatcaaggatgtagcagaaaagcatggcgtgaccaatctagccaagctgaatttggatttgattagtccagattcctacaaaaaggctcgggtcaaacacgcaaccatctatgtcaagaaccaaactggcttgaaaaacatgttcaaactggtctccctttccaatactcaatattttgagggagttcctcggattcctcggaccgttttagatgcccatcgggaaggcttgatccttggatcagcttgttctgaaggagaagtcttcgatgcggtcgtctctcaaggagttgacgtggcagtgaaagtggccaagtactatgactttatcgaggtcatgccaccggctatctatgcgcccctcattgctaaggagcaggtcaaggacatggacgagctccagaccattatcaagagcttgatcgaagtgggagatcgccttggcaagcctgttcttgcgacaggaaatgtccactatctggaaccggaagatgagatctatcgggagatcattgtccgcagtctcgggcaaggagcgatgatcaaccggaccatcgggcacggagaaaatgctcagccagcgcccctgccaaaagcgcattttagaaccaccaatgaaatgctggatgaatttgcctttttgggagaaaacttggcgcgcaagatcgttattgaaaataccaatgcgctagcagatacctttgagccggtcgaagtggtcaagggggacctctatacgccatttatcgataaggccgaagagacggttgcggaattgacctatcagcgagcctttgagatctatggcaatcccctccctgatattgtcgatctgcggattgaaaaggaattaacctctatcttggggaatggctttgccgtgatttatctggcctcgcaaatgctggtgcatcgctccaatgagcggggctacctggttggttcgcgtggatccgtcggatccagctttgtcgcgaccatgatcgggatcaccgaggtcaatccgctctcccctcactatgtttgtggccagtgccagtacagcgagttcattacagatggctcttatggatctggttttgatatgccggataaggattgtccaaactgtggccacaagctcagcaaaaatgggcaggatattcctttcgaaaccttccttggttttgatggagacaaggttcccgatatcgacttgaacttctcaggagaagatcagccgagcgcccacttggatgttcgcgatatttttggagaagaatatgcctttcgggcagggacggttggtaccgtcgcagccaagaccgcctacggctttgtcaagggctatgagcgtgattttggcaagtactaccgagatgccgaggtcgaacgcttggctcttggtgcagctggggtcaaacggacgaccggtcagcacccagggggaatcgttgttattcccaactatatggatgtttatgactttactccggtccaatatccggcagatgatgtgacagccgaatggcagaccacccactttaacttccacgatatcgatgagaacgtcctcaagctcgatgtcctgggacatgatgatccgaccatgattcggaaactccaagacttgtcaggcattgatccaaatgatattcctatggatgatccaggggtcatggccctcttttctgggacggaagtgctaggggtgacagccgaacagatcggaacgccgacagggatgttggggattccagagtttgggaccaactttgttaggggcatggtcgaagagacccatccgacgacctttgctgagttgcttcaactttctggtctgtctcacggtaccgacgtgtggttgggaaatgcccaggacttgatcaaggcggggattgccgatctatcgaccgttatcgggtgtcgggatgacatcatggtctacctcatgcacgcgggacttgagcctaagatggcctttaccatcatggagcgcgtgcggaaaggaatgtggctcaagatctcagaagaagagcgcaatggctacatccaagccatgaaggaaaacaatgttcctgagtggtacatcgagtcctgtgggaagatcaagtacatgttcccgaaagcccatgcggcggcctacgttatgatggcccttcgggtggcttactttaaggtgcatcacccactttattattactgtgcctacttctcgattcgggccaaggcctttgacatcaagaccatgggggcaggccttgaggccgtgaaagcgcggatgaaggaaatcgctgagaaacgcaagaacaacgaagcttccaatgtagagattgacctctacaccacccttgagattgtcaatgagatgtgggagcggggcttcaagtttggtaagctagacctctatcgcagtcaggcgacagaattcttgatcgatggggataccctgattccaccatttgttgcgatggatggtctgggagagaacgtcgccaagcaaatcgtgcgggcgcgtgaagaaggagaattcctctctaagaccgagctccggaagcgcggcggtgtttcgtccaccctggttgaaatgatggatgagatgggcattcttggcaatatgccagaggataaccagttgagcctctttgatgatttgttttgatggattcaacgatcctcgctcggtttgaggttggctaatgatagaaaagaaaaaaagagcaataccctggaagtcagggaaagtcatttccattcgcctacgaaacggcgtctatgttttagcacaaatggtgcgagagccctatctggtgttttttaaccatttcaagcaggaaaatagctggaagggagtgaccttgcaagaggagaatattctcttttgtaaagcagtcactcgtcagtttctacgctctagtcctgtaacgattgtcaaagaccttgagcccctgttagattatcggttacccaaagaatggatttatagccatatgggtgggcacccgattacggtttcggtgaagggacgggagcgccaagtagctggttttggccaacggctttccttggttcaggcggacaaggaaagtggtcaaccagaggataatcctctgctgggactctttcaagcctatatcctaccagatatacaagaacaggattgggaacgagtagggcaggctgagctcatgtctctcgaagtttttccaacgctcaatgaacgtctctatctctgctttcttttggggaaaaatgtgaatccagagctagatatctcattaggaaagcccctgcccgatgagtatgaaacctatctcgatattcttagcaacagcccagaggcgcgacgactctatctgggtgaggaggataactaagaaaggaatggaatatgaagttagaaatttttgcagaagacaaaccagctgaaaaagtctttgagtacaagctagaggtggcagacaatgtgctgctcctttccaccgccatgctctcaggagcgattgctctagctggcttgttttcagccttgaaagattaactgacagcctctattttccttttgaaaatagaggtttttcagtcttttcagatctgataagtgttttctttggatccggattgtgttacaatttttagtgacgaatgtttgtaacaaggaaacagaaatacaatggatgttcttccaaaaaaatgaaatagaggagaagcgcgtggcaagatatttagtagggccttacaacaatagttggaactttatggatgcggttgaaaaagcgcaggatggtgataccatcgagtttgaaaatgggtatgtctttcaatggccgacaaataaagtgatcgagatcgacaagaaccttcattttgtggggcatgttgtcccaaatccaaatggcaatgggcgcatgtttaacaacatcattgaggcttccttccgatttgtagagggagctcaggtgacatttgaagatctgtggtttaaagttggtgggaattatactaccttgctcttatggaatagctcagatattacctgtaaacaggtctattttgaagcaaccactccgacaaatagtgaattttttatctatatggatacgcattcgaagttgacactggaaggagtcgggatgaaggttccggaaaaacaccaaagtgccatcggtatgtccgcttcggaattgtctattcgcaattcaacgattttttctaagattgatctgtcagaaggatctaaattgaccttagaaaatatccatattgaaaaatttgggaataatacgatccatgccaaggactcagaagtgatcgcaaaaaattcaacgattacaggcggggatctggaaaaggattttccaccagtttggttgagaaatgtcatctgggagtctgaaaactgtaaaattgagttgcctactggtactggagtctgtcttgacaacaatgtgcaattcaattcggattcggatcgtataacctccatcaattcatacaatagtatgatccgagctcatcaagctacattttcagaatttttatgggcctatgaagaatcctttgcttccctgactggagaaacaaccttcttgaatgagaatgccgaaaccatttcatttggcgttttcgatgatagtgtgctgatggctgagcatatgatttgtcataagattgcggatcctaatatacggcttcaaggtggagcctttgtgaaggtgggcaccgtgacctatagccagggcgatgcgcgtgatctgaccaaggaaatcgaggatgactgtgactatcttgttggcagagaagtggcgaagggcaatgcgcaagtcgttcctacgggacagacgacggatgcaacggtggctccaaccaccgcaagagactctggaccagagaagaaacaagatgctcttcaagaactcaatagcctgattggtcttgaaaaagttaaacatgagatcaagaaaatgatcaacatggtggaatttaacaagaaacgaatcgctagtggcaaggctcctgaaaaacaaacccttcacgctgcctttatgggaaatcctggtacagggaaaaccactgtggcccgtctgttgggacaagtgctctttgatgcaggtgtcctctcaggggaagaattccgtttcgtggaagcaacggagtccgatctgatctcttcgaatattggaggaacagctgaacagacccaagccctgcttgaaaaagcgcgaggaggcatcctctttattgatgaagcctatagcttggataaaaaggacagcggtgcggactttgggatcgaggcgatcaataccatcctcaaatttatggaggacaatcgtgacgacatcatgattatctttgccggctataccaaggaaatggaggagttcttaaagaccaatccaggccttcgttctcgggtgccaaataatttcatctttgaagattttacaggagatgagattgtccaactaggtgaaatgatcctaagcaaaggagactacaagctcgaagatcgggattactatgcgcggcatgttaagcgggcttatgatggctcgctagataagagcaatggtcgctggatccgtaacctggatgagcaattgaccaagaccatggcagatcgggtggtggcccaaggttctgacgatattgagaccatcctcaatagtgatatcgatgctgttcttaaccaaggcaagtatcaagcaggagccgacaaggaagaagatggtatggctgccctcaaccgtttggttggaattgctaaggtgaaagagcaagtcgaacaattcgtagccatggctgagttcaatcaaaaacgggctgaacaaggtggcattgttgaagatacgaccttgcactccctctttcttggaaatcccggtacagggaaaacgactgtggcccgcattttgggcaatatcctcttccaaaaaggggttatcaaacagaagaaattcatcgaagtttcgcggagcaatctggttggaggctaccaaggtcaaacagccttgaagacgcgtgaagttttggagagtgcactgggtggggtcctctttattgatgaggcctacacgctctataccggtttaaatgatgattttgggaaggaagccttggacgaagtcctcaaatttatggaggaccaccgccgcgatatcgtcattatctttgctggttacacgaaagagatgcacgacttcttgcaggtcaattcaggtctgcaaagccggatcccgactacatttgattttgaagactacagcccagatgagatcgttgagatcggtctgttgggactgcgtaagcaaggctaccaagtcaatgaagccctttatggagagatcgtcagaggaaattatatgcgtgccaatgaccatagtaatggtcgctgggtccgcaatctcaatgaaaaactcttgcgccaagtatcgactcgggtaacccgtgaaggtagtacagactacaattcgattttggatcaagatttggaagccttgagagagaatagcagttctgaacaaccccataccgtggatgatcaaggctatgttcttccttaagctagaaggatcaataaaaaggaggctgggacaaaagtcctagcctctcaattatttttggattgtcgagcaagacgcagtggttgagtgggctctactacgctgatttcatcagcttttacagccctactcaactgtgcggaggtgggacgacgaaatcgaattctaacgaattaccgatttctgtcccactctctttttgaatggacttatggtatactaggaggagatcattcacttatgaaggagaaaacaatggttttaccaaattttaaagaaaacctcgaaaaatacgctaaattgttggtggcgaacggtatcaacgtacaacctggacataccttggctttgaacattgatgtggaacaaagagaattggcccacttgattgtgaaggaagcctatgccttgggtgcgcacgaagtgattgtccaatgggcagatgatttcactacccgggaaaaattcctccatgcaccgatggatcgcttggaaaacgtgcctgactacaagattgcagagatgaactacctcttggaacacaaggccagtcgtttgggtgtgcgttcatctgatccaggtgccttaaatggtgtcgaggcagagaagctttctgcttctgctaaggctttgggcatagccatgaaaccaatgcgcatcgctactcagtctaacaaggtcagctggacagttgctgcggcagcaggtttagaatgggcgaaaaaggtcttcccaaatgcggcgagcgacgaagaagcagtggatctcctgtgggatcaaatcttcaagacctgccgggtgtacgaggaagatccagtcaaggcttgggaagagcatgctgctattctcaagagcaaggcagatacactgaataaggaacaattctcagcccttcattacacagccccagggactgatttgactcttggcttgccgaaaaaccacgtctgggaatctgctggagctatcaatgcccaaggtgaaggtttcttgccaaacatgccaacagaagaggtcttcacagctcctgacttccgtcgcgcagaaggttatgtgacctccacaaaaccgcttagctacaatgggaacatcatcgaaggcatcaaagtgacctttgaaaatggacaaatcgtagatattacagcagaaaaaggcgatcaagtcatgaaagatttggtcttcaaaaacaagggagcgcgtgccttgggtgaatgtgccctcgtaccagatccaagcccaatttcccaatcaggtattaccttctttaataccctctttgatgaaaacgcctctaaccacttggccatcggagcagcctatgcaaccagcgtagaaggtggtgcagagttcacagaagaagaactcgaagcagccggcctcaaccgctcagacgtccacgtcgacttcatgatcggctcaagccaaatggatattgacggcatccgagaagacggcacccgcgtcccagtcttccgcaacggagattgggcaatatagggagcaaaacagaaatcagtaactcgaagagtttgatttcgtagttttgcccccgcacagttgattaggaagtacgagtaccgcaggtaggagtagttccaatcaaccactgcgccgagagacagaaatcagtaactcgaagagtttgatttctacctcgctttttggattcaaggctcgggctaaaaaggtccacaggacctttttagtacccccgcccagttgatgaggaagggccttgctccgcaatccctatctactacctcaaaacagtgttttgaggcatcaaccactgcgccgagagacagaaatcggtagacgcagtctcgtaaaaaaagtaaggtagtagtgatgattcactactaccttactcttttgtcatttaccttattctaaaatcaaaagtccttctttgatttcaaatgggttgtttgggttgatgcggtcatagaacatgatgccgttggtgtggtcgatttcatgttgaacgacgatggagttgtagcctttgagtttgatgcgtttcttttccccatcttttgtgaaatactcaaccgtcacgcgggcgtgtcgaaccacatagcctgggacgttgcggtcaacagagagacagccttccccgtcgccaagagctgcatcttgaacagaatgggcgacaacctttggattgtacatgacttcttgaaggctataggcttcttttggtgggttgccatcggcatcttctggattgggaaccaaaacagcgatgatccgttttgagatatccaactgtggtgcggcgagtcccactcctccacggaggccgagtttttcagccatgacagggtcttgagaatggtgcaagaattgcatcattttttcacctaggataatttcctggtcagacaaagggaaggtcacatcctccgcaaccgctcgaagtgtgggatttccttcgcggataatgtcatccatatcaatcaaatgggatgctcttgtaactttttcaattgctttcatcgttttactctcactttctttctaccctccatgataacacaaaagagcctaaaattaaagttatctgtcgacggtttccgcatgtttgatggacaaatcattcatcctttttgcatctaaaatcgtatagactctcccttctctttggactaagccctcttcgatcatctgcttgatgacgcggctaaggtggcggtagctgatcccaaaatgcagggccagctgattcatcttgggcttgagggtcccattttcatcgcaatgttccataaaatgagtagcgaggcgttccttgaccgaataatgaaagttggcaggagccaaatagttgatctggtgcaatttctcagccaaggtcttggccgtagagcgcaaaaaggttggatcaagcaggaggcgcttcttaaagtgctgggctgggagctggacgactagcgagtcttggtctgcaatgaccgatgtgatacagacccgatcgagcaggagctcaatctctcctaagagtccaggtttttcttggatttcaaggattgtgtcgctaccattttcaagactgtggacgatcttgagccggcctttgagaaaataaggaatgacatcttgctcagaaccctggcggcagatatactctccagcctgatagagaacgagatccagctgactaagacagtcacctggaaagatctgatccaattggtagtcagtgatgatctccatgagtttcgtagatggggaaatttttttcatcttaatctcctaaaataggacaaatgtcctatttttctctttctaaattgattatactaggattctattgaaaatactagtttgaatcttttctaaaaaaaactagtaaagtcaaatgttaccagtaaagtgtaggaaataaaaaaatgaaaaaaacaatggaaagaatcagtctcttgagcttgtcgctcatgctgatctcatctttttcaattacagccggtttgccagctatgaaggcctatttcagccaattcggatattcagcaggacaggtggaactcttggtttccctgccggcctttgcggttgtggtcatgctctttttaaatagcctgatcgagcggtggatgagtgagcgccagatgattgtcgcagggctcttgctcttttcaactagcggccttgtgcctttggtcgtgcaggactatcctctcatctttctgagtcgttttctctttggtttggggacaggaatgatcaatgccaaggctatttcgattatcagtgaacgctactcaggcaatgacaagactcggatgctgggctatcgggggtctgctgaagtggtgggttctgccatcttgacttttatggtgggacaactcttacccctaggctggccagcgatctttgctgtatatggaggtggttacttgattttactcctctatatcctttttgtcccctatcctaaggggaaaaaacagtctagcttgaaggagaaaaagaaaggttccgcacgccttcgctcccctcaatggcgttttagtctgatgctagccgtgattgctggtatcatcatttgtttcaattctattattagtctgcgcgtgccggatatcattgttgacgctcatatgggaacagcgacaacagctggaaccgtcttgagtctgatgcaattaacagggattgtcgcaggggtaggatttgctagtttgacacatgttttcaaaaagaacttgctcatgatcatgtgctttggtttcggtctagcgttagccttgattggcttgtctggacagctgtggagcctggttctaggaaccctcttggcaggatttacctacagtacaggagtaaccagtatcttctatcacttatctgaaaaaattccgactaatcttctgaatcttgcgacctcgcttgtcttgattggctgcaatcttggatcagccgtctcctctttcttcatccagttggtgacgccactagctccttccaatcatctgctctttgtcttgattggtgctttgatgctcctaacaggagtcttcgcctcacaattactagtacgaacgaaatgattgaaaaatcatttcgtttttttaattcaatctattgcgtcctgtcactagctcgtgttattataggaggagtgtgaaaaaaagaatagtttaaaggaaaaaataatgaaaagaatcatggagaaagtgagtattctcgcgctttcatttattttgacgacctcgttttcgatttcgagtgcgcagtcggccatgtttgcctattacaagggaattcctcacagcatgattgagctcttggtctcgcttccttctgcagggatcatggtttcactcatcttcaataaatggattgggcgcctattttcagagcgtcagatgattgtgataggcctagtcgcttacgctctatgtggctttattcccttaatcagtccagcttatccggttgtctttttgtctcggattattttcgggatggcggttggcttgctcaatgtttctgccattgccattatcagtgagcgctataaaggaaaagaacgtgtccaaacacttggcattcggggttctgcagaggttgttgggacagctgttttgacctttggagtgagtctcttgattcgctttggctggcaggctgcctttctcgtctacggtatcagtattccaatcttacttttgtatctcttatttgtgccatatagttcgaaaacagttggtgtagaggagaaacatcggaatgatcagatgacagctggtcaatggcggacggcactaggcttagctgttgttgcggcgtcgatcgtcttatctaatgtcatgattactgttcggattccaagtgtggtggagcaagttgggcatggcactgcccaaactgcagggattatgttagcagctatgcaatttgtcgggatccttgcaggattagccttctcacccttgacccagctcttccgcgatcgcttgttgctcgtttcgggagtggcctatggcttgacccaactgttgatcgggctttctaccaatctctggatgcttgccattgtgaccatccttgcaggctttgcctatagtgtagctcttacaacagtttacaatgtcttatctgataagatgcccgcaggggtcttgagccaggcaacgtccatggcggttttgggatgtagtacaggttcgatcgcaacgacctttgtccttagtctattagggactatctcatctgctccagccttcatttttggattttctggtatcctcatgatcctgatttccttttttggcctttggattgtgcgaaagagcgggaagacatcatgcggctagataaatttttagtagattgtggtgtggggagtaggaccgaggtcaagcaactcctcaagcaaaagaaaattgcagtgaatggaaaaaaagagacagcagggaaacttcagattgatccagccaaggatcaggtgacctttatgggggaaaatctggtccatgaaacctttgtgtattatctgcttcataaaccagctggagtcatctcagcgactgaggatgaccatcaccaaactgtcttggatctattggatgagacagcccgtcaaaaggaagtctttcctgtcgggcgcctagatatcgatacccatggcttgctccttttgaccaataatggtaagctcgcccatgccatgctttcaccgaagaaacatgtgtcgaaggtctaccgtgcccaggtggctgggatcatggatgaggcagatgtggcccgttttgaagcaggcattgccctcaaagacttcacgactttgcctgcgaggttgcagatcttagaggtggatgagacaagcgccagctcctacgtcgaaatcgaaatcgctgaaggaaaattccatcaggtcaagcgcatggtcgctgcctgtggcaaggaagtggtggatttagagcggatttctatgggtcctctaacgctagacccaagcctgaaattgggagaatggcggagactccagccttctgaactcaagtccctagaggtcttcggagttcccttataagcaaaaaaccaagaggctgggacaaaagtcctagcctttcaattatttttagattgtcgagcaagacgcagtggttgagtggcctctactacgctgatttcatcagcttttatagccctactcaactgtgcggaggtgggacgacgaaatcgaattctaacgaatgaccgatttctgtcccactctctatttttctttgtatcaaaaaaatgtacttaaaatacaaaaaagcatatataatagcttgtcttctcaaagtaaatcgattataatgaaaaaagatgggttgtgcataaaatcacaatatgtagtgataatttttcgactcacataccttatctagtaaacgtagaaaaaggagaaaaatcgtttatgaaaaagaggctttattctgttgtgatagcagttgtcctatttttggtagcggctttaggatttgccaaacccaatagtccggctaaagtccatgcagatacgatcaatgatgttgtgacatctgtaaacatctcgaaatcaactggtggggccattacagatccactcggtgtttgggaaagttttcaagttgaagcaaactttgtgttgccaaatggacgtgtaaaaaagggagatcagaccgttatccaacttggagatgactttaaggtctttgaaacggataccattgacctgctggatccaagtggtcaaaaggtcgcgacagcaacggtagatgatcaaagaaaagtcatcactgtaacctacacggattatcctgaaagaatggccaatgtgacagggaaactgcgtttctttgcgcgtgtagaccaccaagtcgtcaaagggcaaaagacacttgattttactctcacgatcgataagaaagtgatttcaggtgggaatatcgattacaaaggggtcaatccgggtgaaaatcctcctactccagaagtctttagcaaatggggctggaccaactcagataataaattaaaattgacctataccttgaacattaatcaaggtcacacagctcttcataatattgatattaaagaccaattggcctttacagatggaaaaatcaaagcagattctgtcaatatccatactggaacttggcagatcgataacgaagatggtgcctatcatttacgagataccaccaatgtcaccaagaattattcccctgttgtcagtgccgatggtcgttctctaacggttcacatcggagatctagctccagaacaaggaatgacaattcgctatgatgtttatttggacaaggtcccagccatcaatacttcctacaaaaacaatgcgaagatgacagctacagaaatcaaggagcaaaataaggttgcagacattctgtatcagttccttgatggaaaatttaatggtgagaaatactccttcactattcataaaaaaggtgaaaatggtcaagcgcttgcaggtgctgtctttgctgtgacagcagatgatactggtgagcaagtgggaactattacgacagatgagaatggtgttggtaccattacgggcttgatcaaacaagcttatacggttcaagaaattcaagctccaacaggctatgttctctctaaagaacctatcaagatcagcaaggacgattttggaaatgacctcgcgatttctcgtgatgttgtgaaccaaaaagaaaagacaagcgttgctagtcaaaagacatggaatgacaatgacgatcaagatggcaagcgtccgtcaaaaatcacagtcaacctcctagcaaatggtgtcaaagtcgcttctaaagaagtgaaaccagatgctacaggaacttgggcttatcattttgataatctcgatgtggtcgatgatgctggcaatgtcattgcctacactgtttcagaagaacctgttgaaggctatgaagcaactattgagggaaccaatattaccaacactcggacaccagaagttgttgagattccagtaacgaaagtttggaaagacaatgacaaccaagatggtgttcgtcctgacaaggtcactgttcgtctccttgcagatggtacagaagtagctagccaagagctaagtgcagcgactgattggaagacagtctttaccaatcttccaaaatacaatcacggcaaacaaattgtctacacagtcacagaagacacagtagccaattactctgctgcgattgatggaacaaccattaccaatagctacaagcctggtaaaaccagcgtcactgttacaaaacgttgggaagacaacaatgaccaagatgggaaacgtccaaacaccattaaggtacagctttatgcagacggcaaagctcaaggaaaagaagtggaactttctgctaaaaataactggactcatacctttagcaatttgcctctaaaagcgaaaggcaaagagattcagtaccaagtgaaagaagttggaacagtcaaaggctatactagtacggttgatgacagtaacaagggaaatgtagtgatcaccaatagccgcacaccagaagtaacagaagtagcggtcaagaagatctgggatgatgcagacaataaagagggtcttcgtcctgaaaaaatcacagttcgcctccttgcggatggtcaagaagtggctgtaaaagaaattacagctactgataattggcaggcaagcttcacggatctacctgtatacaaggaaggtaagaagattgcctacacgattacagaggatccagtagcaggttatacaagcaacattgatggtttcacggtaaccaatcgtcatacgccaccaacaacacctcctaccaccccaccaagcacaccgccaacgactccgcctaccacaccaccaacgacaccgccaacaactccaccgacgacaccaccaacgacaccgccaacaactcctcctacaacgccaccaagcacaccggaaaaaccagaaactccaactacaccaaaagaaggaaagaaaaaaattcttccatcaactggtgaagttgttgcttacggattgaccatactcggtgccctcttagcaatttttgctttggctttgctcttgcgtggtaaacggaaagagaaataagcttcataccgataaaagaggctgggacaaaagtcctagcctctcaattatttttggattgtcgagcaagacgcagtggttgagtgggctctactacgctgatttcatcagcttttacagccctactcaactgtgcggaggtgggacgacgaaatcaaattctaacgaattaccgatttctgtcccactctcttttgaataagttgcttgaagaatgatccatcaaactgtccatattcccaaggttctttttagaaatgagaaaagctcctctcaaaggaaacataagtgtttgacagaaagatgaaatcttggtagaataagaaggtcgaatagacaactaactctttcttggtagcaggatatgccaaacctgccactcggatagagcataaagaaaaggagcttatcatggcaatctcaaaagagaaaaaaaatgaaatcattgcacaatacgcacgtcacgaaggtgacactggttcagtagaagtacaagttgctgtccttacttgggaaatcaaccacttgaacgaacacatcaaacaacacaaaaaagaccacgctacttaccgtggtttgatgaagaaaatcggtcgccgtcgtaacttgttggcttaccttcgtacaaacgacgttaaccgttaccgtgagttgatcaactctcttggacttcgtcgttaatctgctctattttccacttacgctgcgttgtcaccttgcctcgatatactcgagtataatcttcggcttcggttcctagcatcgtaaggtaaaatagaccagatctatctcccttcggggagattttttgttttcagaagaaatccggtacaatcttcggttcgtcgccttgtctagaaacgttctatccagcaagaatggagctctctggattcagggggctgttttcttgtcttttccttatcgaacaagatccatcattctgaggaagtcgttttgtttgacagatgtaatatctagagttacaattgatgcatcataagaaatagaggttatcgatatgattgaaattacatatctagacggtgcaaaacaagaaagagtcatgcattttgattcctacgaagagtttgaacgctcccaacaagcctgcttgattggggtagcagatttttatcctgttgtgaaactgacctataatgggtatgaattggattaccaagggacttacggagatgtcttcttctatttgatgaagcaagatttgacgcagtaccaaaactaaaggagaaagaaaatggcaaaagcaattacagacgcaacatttgaagcagaaaccaaagaaggcttggtcttggtagacttttgggcaacctggtgtggtccatgtcgcatgcaagctcctattttagaaaaattatcggaagaactttcggaagatgagttaaaaatcctaaaaatggacgtggatgaaaatccagaaacagcgcgtgctttcggcattatgtccatcccaaccttgctctttaaaaaagatgggcaggttgttaaacaagtagcaggagtgcataccgcagcacaaattaaggccattgtggctgagttgagttaaaaagcaaaaaagctaaagaagaatgaaccttctttagctttttttgaattttattctcccaattctgcactgtaggcaatgatttgatccacagtgtccgaaaggaattggatggtatcgcggagtggtttgtcagttgagatatctgctccgatgatcatggctgactcaagtggtgtcttgctaccacctgatttaaggaggtctagccaatctttagctccgttttcggagttcttcaaatgcaggtaacccgctgttgagataaccaagccagctgagtaggtgtagctgtaaagccccatgtagtagtggctttggcgcatccaggtcaaagctgcgtcgtcatcgatttcaacggcgtctccccagaattctgtcaagacttccttcatgatgctattgagtttgctagcgccgaaggttccaccttcttcaatcagggtgtagaccttgcgttggaaggctgcttccaacaagtgggtgatgaagttgtggaagtaggtatctgtcaaacggtgagccaaagcaaagcgtttttgacgaggatcgtcaaactggtgttccaaatagtcgctgaggaggagctcgttaaaggtagaaggagcttccacatagtaggtcgacatgtgggcgttgaagtagctttggttgttgtctgagaagataaattgaccagagtgtccgatctcgtggatcagggtgtaaacatcactcatccgtcctgtccagctcataaggacataaggatggacgcggtatggatctgccgcataaccaccggaatccttgccttcattggctgcgaaatcgacccagcgttcggtttggtagcgggcaatttcgtgtgaatattcttctccaagtggtgcgacagatttcatgaccaagtcataagcgtcatcaatggtaacgtcagggttgagcgcactgtccaaatccaacttccaatcagcaaaggtcattttttcaaggccgttgaccttggccacgtgtttgaggaatttttgagcgaccggagcaaagtccttcatgatcaggtcaatctgacgatcaaacatggcacgatccacttcctgctcagctaggagatagtcaaagacagagtcgtagccccgcatatctgcaatcagcttttcagacttaacttgggctagataggtagcagcagccgtgttttggtgcttgcggagaccttctgagaaagaacgaaaggctttttcacggacttctgcattctcatggttttggtagaagttttcataggtaacaaagctattcttgtaaacttttccatccacttcgaaatcagccatttcaaagtcgcccgcccgcatcttggtatagatgtcttgcggtccgtagaagacttcaccaaggttggtcaaggtcttttccacatcagctcccaagtagtgagctttcttgattttggcttggcgaatggcaaaagtgaggtgaggaagttgtcccaggcgttcgaggacatcttcatctgcttcgaccaaagcatcatcaaagaaggaaagttcgacgctggcccaagtttcgaaatccattcccgcttgagcaatttccgcaaaagcttcgtcgccaaagtcagtggtttgtggcataaagctgtagttgccaatgtggctgagttggatctgaatttgttcaaagaccgcaaaggcagcttcaaagtcttcaaaagtgtggagcttgcccttgtagttacggacaaattcattgatttcctcgcgagtcttttcaatggcgcgcaagaagtcttcctggtcttggtagagggctgtgaggtcccagagttcgttttcaggaaattcagaacgtttttttaattccatagtgttctccttttgatcaaataactatactaagtatagcagaaaaaaagacagaaacatagggggagaggggaaaatgcttgtgtaaaaatcttgaaaagagctgggaaaacattttagattaaaatttcaattctaactactatatttaggtaagacatggattgaaattttgctgatatactaagtacatcagagtattgcatttcatgcaatactcaacactaatagctataaagaatataaggattgtttgataattttttgtggcaattcttatattcaaaattttagtaaaatgttgctaattagtgataggggaggttatatatggaaacaagagaagaaattgtctctaaattagaactcattcgtgagaatatattgggatttattcaagcccgttcacgtcaggttacacttgttaatcaaatgagaacagccaaattgattcaacaagatgaatataacgacaacacattgtctcataaatccctcaagcttgctttttcaattatggtattttcaagtatttcgatactattaggggatttattgtatgtcatcttacttggtgctgtgaatcgattaatcggagatattatctttgaagtattattcttatcaggatttttatttctattgtatcgtcgtatgaaaggttcaaaggatagctggatttatccagcgacactgattatgggagggatcttactggtattccctctacgtttgcttttgactcctaatcctataacattaattctacttggagtatcaattgtagccacctatttcatcattcaaaataagctggaactcatgattgcgtttgtgaataaaggtattcgtaataaaaatgagcagcatttaagagattaccaagcagtagttgcagaaaatcaacgattagaattggcctatcagcaagagggacgtttgatggaaaatttccggaatcaagctgtagcaattggtcaaggatggtaccctaaagattattatgcactagatgcagtgaactatcttattcacgcgtttaataatttcaaagcagataatataaaggaagcaattaatctatacgatacatatttagaccgtgcagcccgtcgagcctttgaggcagagatgatcgaacttgaaaaagagcagattattaatcaagaacgaatgatcaagcttcaagaacatgcaaatattttaagtgctagacaaattgcagaaacacaagaagcagctgctgcatcacgtgctgtagcaagtgaacttgagaatattcgttatggaagataagaaatccgggataaataggtagggaagtaaatagaaggaatataattatgaataaaacaacaaagaaaagtattgctatcggtgctactattattgccgctactgctgtaacttcagttgtacaagctgaagaagcgccagttgctcaacctcagacagggacatcagcaactgtttcaaatattgaccatactgctgaggttacaaaagaggcagttgatacagcaaaagagcaagctgatgctgcggctaaaacggtaacagaacaagaaaaggttgtcagcgtggccgatcaaaaggctaaggaagcggaagctgctgaaaaaacggcagcagcaacctatgaaaaaacaaaagaagctgcgagggaagcaactcctgaaaatattgcaaaagctgaagaagccattaaaacaaaagaggctggtgtgaaatcagctgaagaaagtgtaaaaacggctgaagaaggtgtgaaatcagctgagacagcagaagccgaatcaggaaaaaaatatgaagaggctactaaaaaaatagaagatgaaaaagcaaaagtcgcattagccaaggaagaagtgaagaaggcagaacaagctcttaatgagacaacactgaccagagcacaggagacagtgacgattgcgggaaataaactgaaagatgcagagtctgtgaataaagccgctcaagatgaattgactcgtgcaaaagaattcgacgcatcccgtcaagctaaaattgatgaaacaaaatcagctctcgaaaaagaacgtactgaaaagaacgttcctgctcttgaacaaggtctcgctgatgcaaaagctaacgtagaagcaaaagaaaaagctcttgctgaaacaaaagctaaagcaggtgtcgctcaagctgaagttgatgaagctcaaaaagcacttgatgcagcaaacgccgcttatcaagaaaaagttgctaagttgaaacaagacgaagctctccgtaaaatcttcgttcctgctgactatgcaaaacacgatattaaggactacgaatggttcatctctcataaagatgagttcatgaaattgcaaccagaaatcgactgggatgcttatagccaaacaggcattggctctaataaagaagtcgtcgatcttgcaaatcttacatcagctcaacgtaaagaacttgctgaatttacggctcaaatgttgaatgaccttaaccaacaatattggtctaaacgcgaaccaggtaaaacaatagaacctcttcaattgacagtaggtggtcaagaaatggctgacactatcgctcatggatattctaagttctatgcggataatggagggacaccagataagtttaattttcttaaaaattgggaacacctatcttcaattcttggacaatacggtgcgggagaatctcttgggggacttttaccagaatggcataaagaaaactttgacggatacactatgttaaatatcaaacaagacattgcgagcgcaatccgtaaaatgatgtttgccgatggtgaccaatctaacggtcacacaaaacatttaatcacacttcaaggaactggtattggtatcggtataagttctggtgcggttcacattttgtcaacaagccgtgctatgaacgaagataaggcagactatattagtactgatgctgaatacaaatcctcccttacttcttcgattgcagagaaagaacaagcacttcaggcagcaaaagataagaaaatagcagcggataaagccgttaaatctgctgaaaatgatcttgcttctgcaaaatcagctcaagttgacgctcaaacaaaattgaacgctgctcaaaatgctattgctaaagctcaaaaagcatacgatgacgcgcttgcggtcaaagaacaaactccagcagctcaagctaaagtagttgaaactgcaaaagctcttgaaacagctaaagatgaacttgcaacagctaaatcaaatcttgcaaacttgcaacaagttcgtgcacaacgcgaatctgaattaaaagacgctaaagctaaattggttgctcaagaagaagatcttaaacttgctcttaaaacagcaatcgacgctgaaaacgatttgaaagcaaaaggtcttgcaacaactgaagctaaagctaaagttgaacgtgctaaacaagctgtcaaatcagcagaacaagccgtacaagacgcaaaagattatcttgaattgctcaagaatgctcctacaaaacttgctgaagctgaaaaagcactaactgaagcaaaagctaaaacagctgaagctaaagcaactcttgaaacagaagttgcaaaacttgaagctttgaaagtaaaagcgaaagtggctcaagaagattacactcgcgtcttcgaagcttatcaaaaactcgttaaagcgaaacaattggaagaagcaattcgtctcgaacaagaacgtatcaaacacgaagaagaaactcgtcgcaacgaaccagttcgtcatgaatccactcaaaacaaagtgatgaagacaatcgtcccaatcgtaacaggaactcctggtgcaaacacaccagttgcagctcaagaagaacaagcaaatatgaagaaattgccatcaactggtggaactacaagtacacttggacttatggggctagcaatggcagctctaggttttgttggattgaaacgcaaacgcgaatcaaaataaaaacactatttaggctggggaaacccagcctaaaatgatataattttaagaaaaaagtaagtcgaatggggaaatttttatgaaaaaggttatgatttcactactggcgggtgcgtccgttctagctctggtggcttgtacgcccaaacgctatgaacgccaaagtaaaacaaagacagcaacgtcatcatcggttaaaaaagagaagaaggatacaggtcaaaagtattatcaagaggtattagatcgctataagtcttatgcggttgccattcatactaaggacaaaacagctttacaaaatgaactgaagaagatcgaagcaacttcagaagaatatgcgtatgtctttaaccttcaaacacttgggagtaccaatgagtggcaatatgcttttgaggatcttaatcgtgatggtaatgatgaactgctgattggggatggcaaaacgattgctgctgtgtattatttgaaagataagcagccaaccttgctccatgtagcctatgtggcttctgcaggtggctatcgctctagcttagaagtttttgacaatgggcaaatcgtctatgccacttggcaatcccttaatccagaaatggaattgatcctatattcactaggaaaaggggaagccaaggaagaaaagaaagcaaccattcaaattggtgggaaggaaacagcagagcaggctctcggtatttcagccaagaagttagacctcagtaaacttgactggaaaacatttgatggtacaggatactccaaatcaacagctaaagcagaagagaaaaaatcggaaagctttcaagtacaagttagcgtggccgatcttcgtattcgaaaagaaccgtctacttcagcaccctctgcagggatgatctcaaaaggaactcacaccattacggaaaccgtagatgccgatggtcatacctggggcaagcttgaatctggacaaggctggatcgcccttgacttcacaacgcgtgtggatggttctaaatcagcaagcacaagtaagaaaagcagtggaatgaatattcaagaaattcagaacggtgatttttcaagtattgcagggacctggagaaatgggaaaggaatgagtgtaacatttgatgataacggtatatcaaagataaatggtgcaccaacagatcaggttgtagaccgctttaatcatgaatttggatacttaagtagtagtgttcattcaactgccccagctggtgcttcagcaatgagttttttcccagcaggtcaagagtttcctgcatcattaaaatatggaaatttttctgttgataatagtaaggatattatttattggggtcagaatgttatttcagatcaaagcgacttgttctataaggaagactaaaaaaggttagaaaaacaaaaaattatatttgctagtggtctcttcattgatactgagtaaatagatttcctttgatagactaggataaaaaaataggagatattgtgaaaaaatttattattttattcttaacagttggttcggtaatttccctagcagcctgcgccccaaaacgctatgagcgtaagcacagtccagtaggagcttcatcggtcaaaaaatcatctgacaaggcgcaagaaaaagaacagtcagaagaagctaagtcagatgagcatgataaagaagccattgggaccttgtcaaaagcggaccaagcggatatctactcgatcattgaaaacagtgcgtctttgacctattcacttcaggtgcaaccgactcgcttgctagagttgaacaatgatcacggtgcggttgatggttacccgcaagatatgttcattgattactacaatacctatacgccgggaacctataatctgcaagatgtcattgataaattgaatgcagaagagacatcggactctatccgcagtctgtcacaagacaagctgatccaactgacaaacgaaaagaaggacggctggctctattcgacaaaagacaaggccttctacgaaattgtacctggtggtcgtggaggagcgatgccaccgatggaaatcccttcgcctgatgaatgggtggtcaatgaagattcagttgaagtgacaacgactatccaaggtacttccgatccatacagacgttttgtcttgaaacgtaacaataagaactacaagggtggaagccataaaacacgcttttatgtcgacagtacagaattcgcgaaatcttaaaaataaatagaagctatacctggatctaaaatttttatataggtctcttggaagattcgcagaaaaaggcccttaaagcctttttcttttgggcttgaatatgttaaaataaaaggtatacgtgcttggatacaaagatgaggatataacaaatagatgggctcttgaaattcctatctcgttgagttgggtagccttagtatcttgagtaattgaattttggcctcatttcttaggaaaaaagataagcttcctagcactcatcgagtgcggcgtcaccttcctatttttctacagaaatgttcggcaagccgaaccgtccaaaatatcttgatagttgaacacgggctaatcccctagtgaaaaagatagatttcctggtgtgcgtggcacactgcgtcaatctcctattttcatacgggattcttcacgccctttgtatcctgatgaactgaattttggcctcatttcttaggaaaaaagataagcttcctagcactcatcgagtgcggcgtcaccttcctatttttctacagaaatgttcggcaagccgaaccgtccaaaatatcttgatctttgtaggcaagtcgtataattttatcaatccaaaggggattacaatgacaaaacaagtgtttcaaacgacttttgcgggtcgtgagttaatcgtagagactggccaggttgccaagcaagcaaatggcgctgttgtcgtacgttacggtgagtcaactgtcttgacggcagctgtcatgtctaagaagatggcaactggggatttcttcccacttcaagtcaactacgaagaaaaaatgtatgcggctgggaaatttcctggtggctttatgaaacgggaaggacgtccttctactgatgcgacgttgacagcgcgtttgatcgaccgtccaatacgtcctatgtttgcggaaggtttccgtaacgaagtgcaagtcatcaatacggttctttcttacgatgaaaatgcctctgccccaatggcagccatgtttggttcatccttggcactttctatctcagatattccgtttgacggaccaatcgccggggtacaagtaggttatgtggatggggagatcgtcatcaacccaacgcaagaacaagctgagcgctctcttcttgaattgacagtagctggtaccaaacacgctatcaatatggtagagtctggcgctaaagaattgtcagaagaaatcatgttggaagcccttctcaaagggcatgaagctgttaaagaattgattgccttccaagaagaaatcgttgcagcagttgggaaagaaaaagcagaagtagaattgcttcatgtagatgctgacttgcaagctgaaatcattgcagcctacaacagtgacctccaaaaagcagttcaagtagaagaaaaattagcgcgtgaagctgcgactcaagcggttaaagaccaagtgacagccgtttacgaagaaaaatatgcagaccacgaagaatttgaccggatcatgcgtgatgtagctgaaatcttggaacaaatggaacacgcagaagtgcgccgtttgattactgaagacaaggttcgccctgatggtcgtaaggtcgacgaaatccgtccgttggatgcacaagtcgactaccttcctcgcgtgcacggttcaggactctttacgcgtggacaaacgcaagctctttctatcttgactttggcgccaatgggtgaaacgcaaatcatcgatggtttggatccagaatacaagaaacgctttatgcaccactataacttcccacaatactctgtaggggaaactggacgttacggtgcacctggtcgtcgtgaaattggtcacggtgctcttggagagcgtgctcttgctcaagtattgccaagcttggaagaattcccatacgcgattcgtttggtagcagaagttttggaatcaaacggttcttcatctcaagcctctatctgtgcgggaacacttgcccttatggcgggtggtgtgccaatcaaggcaccagtagcaggtattgccatgggtctcatctcagatggaaataactataccgtattgacagatatccaaggtttggaagaccactttggagatatggacttcaaggttgcaggaactcgtgatgggattacagcccttcaaatggatatcaagatccaagggattactgcggaaatcttgacggaagctttggctcaagccaagaaagctcgttttgaaatccttgatgtgatcgaagcaactattccagaagttcgtccagaattggctccaacagctccgaaaattgacaccatcaagattgatgtggacaagattaagattgtcatcggtaagggtggagaaaccatcgataagatcatcgctgaaacaggcgttaagattgatatcgacgaagaaggtaacgtatctatctactcgagcgaccaagatgccatcaaccgtgctaaggaaatcattgctggtttggttcgtgaagcgaaagtggacgaagtctaccatgccaaagtggttcggatcgagaaatttggtgcttttgtcaacctctttgacaagacagatgccctcgttcatatctctgaaatggcttggacgcgcaccaaccgtgtcgaagacttggtagccatcggtgatgaagtcgatgtgaagattatcaagattgacgaaaaaggtcgtgtcgatgcttctatgaaagctcttctccctcgtccgccaaaagcagaaaacagcgaggaaaaaggtgaaaaaactcatcgccatggcgaccgtcctcgtcaccacaacaaagaccacaaacctaaaaaagactttactattacacaaaaagattcagaataatcattagaaaaggaggagcacggtatgggatggtggcgtgaaaccatcgatattgtaaaagaaaatgacccagcagcgcgtacctcgctggaggtccttttgacctatccgggcgtcaaagcactggcagctcaccgtgtttcccactttttgtggaaccatggctttaagctcttggcgcggatgcatagtcagttttggcgtttttggacccagattgaaatccatccaggtgcgaccattgcttctggtgtctttatcgaccatggagcgggcctcgttatcggggaaacggccattgttgaaaaaggtgtcatgctctaccacggggtgacccttgggggaacagggaaggatgtcgggaaacgccatccaacggttcgtgaaggagccttggtctccgctcatgcccaggtcatcggtccgattgagattggggccaaggccaaagtaggagcgggagcggtcgtggtttcagatgtaccaagtgatgtgaccgttgtcggtattcctgccaagattgttcgtgttcacggtaagaaggatgagccaatcattcaccaagaagaagaaaaacgcgaatactatgtgaataagatggagcatgccaaggaagccagtcatcggtcttctagcttgtaaggagatcgctacgtgattcaagcaacccatacattgaatgaccaccaactactggaagcaaaggcccttattgccatctgtcagaagtatgacggaacttttcgggatccttatctctccaatatgctcaattttgatcccgatatgcccgcctttttcctttattatgaaaagggtgaacttgttggcctattaactatctatgcggatgaccaagatgtggaagtagcgattctggtctaccccaatcaccgtcggcagggaattgcgcgtgctttgtatggaagttttgagacagaaacggcctcttatccaattgagtctgtaacttttcagacagaacgtgtttttctagagcgccatcctgagtttgccagcaattggggactggtcgaggatgaagagacagaaacctggttaggtaaggatagaagaccttatccgttagccactgtttccaatctggacgttttgttagcagatcgttcgtatcaggatcaaattagtcagttgaaatttcaggcattttcagaggagcatgaatctaaagaagttgtggatagatatgtcgctgaagctctgaaagatccagaaagtcgcctatatattttgctaaaaaacggtcaggttattggaacttgtacagttgatttatcgagtaatacgaattacctctatggtttagcaatagccgaacatgaacgtggaaaaggctatggaagctacctggcaaaatctcttgtcaaccaactcattgagcaaaatgacaagtcctttcagattgccgtggaagacagcgatgtaggtgccaaacgtttgtatgaaaagattggctttgtcaaacagactcaggtggtttatttgaagccaaaagagtagaaacagaaaggaaatgaagcgtgttaaaaatttatgataccatgtctcgtgatttgcgagaatttgtccccatcgaggaaggaaaggtccgcatgtatgtttgtggtccgacggtttacaactatatccacgtagggaatgcccgctcaacggtggcctttgacacgattcgtcgctactttgagtatcgtggctacgaagttgcctacatttccaattttacagatgtggatgataagatcattaatcgtgccaaagaggaaggcattactcctcaggaagtggcggataagtacatcgcggcttttcgtgaagatgtgacggctcttggagtcaagcctgcaacccgccaccctcgtgtggttgagtttatggatgatatcattcgctttgttatcgacttgatcgaaaaaggctatgcctacgagagccaaggcgatgtctatttccgtgtggaaaaatcccacaactatgcaaaattagccaataaaactttggaagacttagagctaggtgcttctggtcggacagatgaggaaacagctcgcaaggaaaatccagtcgattttgccctctggaaagctgccaaaccaggtgaagtttcttgggaaagcccttggggacctggtcgtccaggctggcatatcgaatgttcggtcatgtcaacggggattttaggcgataccattgatatccacggtggtggagctgaccttgagtttccgcaccataccaatgaaattgcccagtcagaggctaagacaggcaagacctttgccaactactggatgcacaatggttttgtcaatattgataatgttaagatgtccaagtccttgggcaactttatcactgtgcatgatgcactcaagaccattgatggtcaagttcttcgtttcttctttgcgacccagcactaccgcaagccgattaacttcacagaaaaagctgtgcgcgatgcggagaccaacctcaagtatttgaaaaacacttatgagcaaccgttcacaggagaagtagatccagcagacttgcaaagttttgtggacaagtttatcgcggccatggatgaagatatcaatgccgcaaacggaatcaccgtcgtctttgaattggccaaatggatcaattcaggtcactacaatcaagacgttaaggatgccttggcaaagatgttagaagtctttggagtggtctttgttgaagaagttttggatgcggatattgaagccttgatcgctgaacgtcaggaagcgcgggctaagaaagattttgcgcgagcagatgcgattcgcgatgaattggctgcacaaggaatcaagctcttggatacaaaagaaggtgtaaggtggacacgtgattgatgtcaatctaatcaatgggattgcccttgcctttgagggagatgcggtctattccatgtatattcgcagacacctgatttttcaagggatgaccaagcccaataagcttcatcaggctgccacccgctatgtctctgctcgggctcaggccagcttgattgaaagcatgctggagcaagaaattctgacggaaaaagagttggagatctacaagcgcggtcgcaataccaatagccacaccaaggccaaaaatgctgacgttgtgacctatcgtatgtcgacaggttttgaggctgtcatgggctatctccatatgacgggggagctctctcgtctagaagagctgattgactggtgtatccagcaagtagaagaaggaagaaagcagtgaaaaatatcagagagtggtttcctcatgcagaggtgacggatcaagccaatccaccagctggttatgtagccattcctcttcaggctcaacaatggttgctgctgaaggaagaagagctaaccgagcgagaaaaacaattgatttcctggttgggcggtgaagaagaggttgcccctaatccttggtaccagtacctgatcgatggaaagggagaagcccctcaagtcatcaaaaaaatgcagctcgtctattgccacatctcgcattcaacagcggaagggacggcttcttggttagagatgatgcagacactcttgcccaatttccgagcaaccttgcaactgagcggacaagattatgtgcttattctagatcaagaccagtctttacctgtggccgatatcttaaaagatactgtctctgccatggagtatgacttcaatattcgtttatctatcctggttgggcaagtatggaccgagtcaaaagacgggaaagtgtctcctgtcatccgagcagaacaggcggtctttcgagcttggattcgagaaggccatcaaggtgtctatcgcttttctcaactctatctgtggggaatcgagcaggcagatctggatctcaccccaatcaaagaacgcttgcatcagttgattgaaagtcaagatcaattgcaagacatcattgttgctctttgggacaatggcgcagtcgtaaccaaggccgcccagcaactctatctccaccgcaattcgctccaatacaagattgacaagtgggaggagttgacggggcttcagttgaaaaatctgacagatctagccctgtgctatcatttagttttacaagatgtgatttaaacggaatcaatccagagttttgtgcaacttgcacaaaactctttttcttttttgtgagacttgccatagaattgtaaaacgttttcatttacaatagaactataaaaatcaaaggagtaccatcatggtagaattgaatcttaaaaatatttacaaaaaatatccaaacagcgaacactactcagttgaagacttcaacttggacatcaaagataaagaatttatcgttttcgtaggtccttcaggatgtggtaaatcaacgactcttcgtatgatcgctggtcttgaagacatcacagaaggtgaatgttccatcgatggtactgttgtaaacaacgtggcacctaaagaccgtgatatcgccatggtattccaaaactacgctctttacccacacatgactgtgtacgataacatggcatttggtttgaaattgcgtaaatacagcaaggaagatatcgacaaacgtgtacaagaagcagctgaaatccttggcttgaaagaattcttggatcgtaaaccagctgacctttctggtggtcaacgtcaacgtgtggccatgggtcgtgccattgtccgtgatgcaaaagtgttcttgatggacgaacctttgtcaaacttggatgcgaaacttcgtgtatccatgcgtgctgaaattgcgaaaatccaccgtcgtatcggagctacaacgatctacgtaactcacgaccaaacagaagcgatgacacttgctgaccgtatcgttatcatgtctgctactaaaaaccctgcaggtactggtacaattggacgtgtagaacaaatcggaactccacaagaagtgtacaaaaacccagtcaacaaattcgtagctggattcatcggaagccctgcaatgaacttcattaacgtgaaattggaaggtggatacatcgttgccaatggcttgaatttgaaagttccagaaggtgctttgaaagttcttcgtgaaaaaggctatgatggtaaagaaatcatctttggtatccgtccagaagacgtgaatacagaagctgctttccttgaaacattcccagaatcagtagtaaaagcaaccatctctgtatctgaattgcttggttctgaatctcacttgtactgccaagttggtgacaacgaattcatcgctaaagtagatgcacgtgactaccttggaactggtgaaaccatcgaacttggatttgacttgaacaaagctcacttcttcgacaaagaaactgaaaaaacagtatactaatacctactgacactgtagagactgagacgatatgtctcagtttctttcattttaaggagacaaaacatggaaaaagactggtggaagggtaaggtcgcttatcagatctacccaaaaagctttaaagacagcaatggtgatggcgttggggatttgaaaggcatcacggagaaactcgattaccttcaagacttagggattgatattctctggttatcccctatttacaagagtccgtttattgaccagggttatgatatttccgactattatgccattgatcctatttttggaactatggaagatatggaagagttgatcgcggaaggcaagaaacggggcatttccatcatcatggacctggtggtcaaccactgctccagtcatcatgagtggttccaaaaagctctagcggatccagatggcccttatgcggattacttttatttcatcgaaagtgacaaggaacccaacaactgggaaagttactttggaggcagtgtttgggaaccggttcctggtactaacaaatactatctccattccttccacaaggatcagccagacctcaattggcaaaatcctgtcgtacgcgatgaaatttacaagatgatcaactggtggttggacaagggaatcgcgggctttcggatcgacgccattatcaacattaaaaaagatttagaatggcgttcgcttccgtccgatcgtgataatggcttggtcccagtaccggagtctctggtcaatgcgcaaccgattgaacctttcttgcaagagttaaaggagcggaccttcgccaagtacaatgcctttacagtaggggaagttttcaatgaaactgacgaagaattgcatttcttcattggaaaagatggtgtcttctcttccatctttgatttcaaacaaaccatgctgggtcaggaaggaaaaggctggttcgaccatgctcttccaactgcagatgaactcaaggaaagtattttccaagcccatgagcgcgcagatagtattggggttctatcgaccatcattgaaaaccacgacgaacctcgtggcgtgtcccattatattgcggaaggcccagtaaacgataccagtaaaaaggctttggggaccattcaggttttgcgcaagggaattccgtttatctatcaatgccaagaaattggaatggaaaaccaagtctttgaatcggtggaggattttgatgatattgcgaccatcaatggctaccatgttgcgaaagaagctggtttgagcgaggaagaagcattagctgcgattgccaaatacagccgggacaatgcgcgaacacccatgcaatggtcggcagagccaggattgggctttagcgatggacctgcctggttgatcagtcccaaaccaaatgttgccatcaatgtggaagaccaggaaaaggatccaaattccatcttgaattattaccgtcagctgacagccttgtatcgccatcccctctatggaaataccatccggtttggagatatgatcccagcttatcgggaccgcgagaatatcatcgccttcgaacgccgtggggacaagcgtctcttggtgatcagcaatttccaaaatcgccagggcaccttggagttgccagctccgattaaaacagtcgttttaaataatacagcaggattattccaagaaggagaccaagtgctcgaattgaccccttaccaaactgttgtgttggaattggtggaatagaaaagaaccttcgcagacgcgaaggttcttttgaagatatatcttttgaaactttccttaggtgagtacggacgtcagcgaacttcttcgaagttccatgactaattattgagcctgaggtctcaataattccgcgtgcttgaaacataatagtttcaagcacttttctcacggcggaaagtttcagtataagactgaatactgctaaatactagagcgagttttataccttttgtctaatttcttagattatttcatatgaaaaattgattttctatgaaaagatgaacttgaaattcatagctagtctaaaatcttactcaacttctttctttttcaagaggaggaagcctccgctaacggctaacaagaagcctgaaagaatgaagtgtgcggttgtgtcttctccagtttgtggcaattgtgccttggctggactttcttggaagctttgtcctacttggtaagtcaaggcttgcacgctttcttcattttttgttgtcatttctttttgtggaaggagcactttaggagtatccttcttggctaagattggctgtggattgcttgtttggttatgaattggaaccaccacttgatctggttctttagctggaacgtaatccatcaagcttgccaacttgctgccaaagatcgcattggttacccagcggaagaagtggacagggtgttgacggttggttggatttcctgcatagacaaagagtggttgtcccatcagttctccagagatggccatgactttgttggccagaacatcgttatgtggccaccaacctgcaatataataatcgctcggagcgatgctcatcagggtcttaaaatgctctggaaacttttcaatccagtttcctgagttggagtagaagagggtattcttcttgtagccgctggtcaatggatcctgatcatcaatgatggctttcatcaagccttcgtagtcactaccgccttttaatttttcagcgtcaaatcctgtaagaactcccaatttttccagcttttgcatggcttccccaccaatgacaagggttggttttttaccaaaaatggaagcgtcaaagcggttgctttccaaaataacaacatccgcttcttctggcgtattgacgatttggaagcctaatttttcaaggaccagactagtatgagcaggcgcatctactccagcccaattatagtggtagttcggagagtagaccttcatcggtttcaaggttggtccgcttggcaccttgtagagggcatccccataaatggcatagtttggcaggagcgaagcaaaggtatcgcggtcaacgatgtagccatcgtctgttagatagacggattttccttgtgcaatagcctggttaacagctttaacggcactggctgaggtatttgcaatcacatagtaaggagcttttggatcgatctcagaggtacgagtggcgcgggtggtggtgacttctcctaattttccgttgaaaagaccatccgcaaagacaggttcggacttgaagcctctcatatctgggaagttgaccagcaactctgcgtacatagcagcccaggcagattcgttggagcccttgtagagaatgtggttggcatagccacgtttggcttgggccatgtcaatgactaagtccccttttttatagttgccaatatcttctttgagttccttaacgaggacaccattgcgtttgaagtagtcgatcatattgaaggcttcttgggcatcgttgtctttgtcgaggctcattgggatgacgtagtagtctgggaagaatttcggacgaccatttttcacacgtccaacgacttccccatttgggccaaccagttcattttcggcttttggatcttcggttttattgagaccacgcaggtagaagttgagacgcatctcaaggagacggtccggatcttggttgaggaagtcaatccctcctaggacagcattgcgacctgctttgtaggattcttcatttccttctggaatttcgatggtatggcctaagataccatggtagacagcataaacccctgtatagccagagaaggagtcatcccagccatcaccccaatccagttttggaatgatgtaactattgtatttagaattggcaactcctgcccgtcccatatgatgggcattttctagcatcaggtctgacagaagatcgtattcgaagttcggatcatgtggtggcgttgcaggttcgattaagaattctttgacaaaaccgtgtaagtcgtagagagcgatcggattccatttgttgatcatttggataaccgtgcgaacttcagggttggtttggtagctggcatcccggtttggatcgagcccgtttgctagggcccgcaggttgagagcatccccatctgggttttccgtgaagtcaaataagaagatgaatttattgagcaaggttggaatatctagcgtgactgttttagcatttccagcttcatcggtggtgttaaaggtcaccttttccttggtcgcaaaagtattgaagaggcctgtgatgatatcaatgcctggctgttcatccgcgtgggtgttgtggaccaagacaggtaatttgtaatccaaggtcttgtcttttagtgcggccagcatttcgcttggcttagtcaaagctgtagggttggtactagagaggtagtgatcgatgctggcttggtccttgctcacgatccccatcttcatatcccggccttgggcactcttgccaagggtttccagctgcaccaaacgatcgggtttcgcttcttccttggatttttcgatggcagctagcatctcttcatgcgtatggtagtcctgataaggtcgaaaaacaagggttttattgatggtcacacctaagtctgcattggttccgaccagctcatggttgccgatgtaattgcgataagtccggcgaatattatttgggctacgaaggctaagatcttcaccaaagagatcctgcacgtcaatgtggagatccaaatcattgccgtttgcggtctctgtgatggtgaggaatggatccttgctcagtgttcctgtctccatatcccaggttttccactcagagagaggcttattgtctaaggtccagctgatcttgccagcagcttgagctttttcttggactttgtcatcaatcgtactcttttcagagagataaatggtgctatccgccaagcgtgtcgcttggtcagcggttgttgtagcacggttggtgactggactagcggctggagcaacttctgtagtagaagccacatcggaagtcgctgctggttccgcagaagtggcagtgactgcggtgtcttctttttcagctacagaaggactggcagtatcagctgtcacaggttgctcagtagcaggtgtcgcttcaagtaccgtgcttggttctgtttgaggcgcttctaagctatcggctgaagcttggccatgaccgataacggaaagcaagacagccgctgagaggctgagtgttgtagtgtacaaatgtttcttatacgaagacttcatcatatagaagaccctccttaaaaagttattttccagttctagtataccattttaggaaagcgtttacaacaactgcctgaataaaaaagcctttgcatcttgcaagggcttctttgtctattctgtctcctcatggaattgttggtaaaaatcaaccttgacctggataaaagtttctaagtctcttaagagttggagcaaggtggcgcgtgtttcgaattcttcacgggtcttaggaagagggcgttcgcgaaagatcgctaaatactgactaatatcatcaagaagatcttgggcgggattttcctgacttaattgttgggccgtcttcttaaatagttgagctaggattatgctttcgctcgccgccaactgacagcggttgacgttttctgccatatcccgcagaatatcgttttgccgcttgcgcatttcgaagtagtgaatatggtagttggtttggtgaaagaggtggttggaatggtccagatagactagatttaaagcgtcctgtaggataccatccaactccttaatcaagcgagcatcattgcgaccatcccctttaccaagtaattccgcaaaacgaccaaggatcttctttagttggtcttcgacaacattatggtaatgatcgatcgctccctgattagaaggcatatagagattggccagcagggcaaagctggtccctatcaaaaagagagcaagttcattgagcaagagcccccaggaagtagactgctcaatcaagagatgggtgaccagcaccgtacttggcgtgatgccgatctgccaacccaataaaaaggcacaagggacataaagagcgataaagactcccaatgcccagaggttgaaccctaataaagaaaaggcgagacttccgatagcaagggccagtaaggtcgacataaagcgctggtaggcctgcttgatggtactgcgacgcgtatcagagatactcaagatggcaatgacgccagctgagatggcataggtcaagcccagagcataagccagggccgctgctaaacaggtggccaaggtgagtttgatggttcgttgaaaaagaggcatggcttcctttctattttgctggtttcgctgagatagatttcatttcattatatcatgaattggcctcatcctcctttcttatggtatactagttctatggaaaataacgatatcgtatacggtgtccatgcagtcaccgaggctttacaagccaatacaggcaataaattatatattcaagaagacctccgagggaaaaatgtcgacaagatcaaggccttagcagctgagaaaaaagtgtcgatttcttggacgccaaagaaaaccctgcaggaaatgacagaaggagctgttcaccaaggctttgttcttcgagtggcagcctttgcttacaccgacttggcagcgattctgaaacagacagcccaagaagagaacccgcttttattgattctcgatggcttaacagatccgcacaatcttggatctatcttgcggacagctgatgcgaccaatgtctcaggagtcatcattcctaagcaccgagcggttggggtgaccccagtggtgtcaaaaacttctaccggagcagtggaacacattcccattgcgcgtgtgaccaatcttagccaaaccttagacaagctaaaggaagagggcttctggatctttggaaccgacatgaacggcacgccatctcatcagtggaatacggctggcaagttagccttgatcattggcaatgaaggaaaagggatctcagccaatatcaaaaaacaagtcgatgagatgatcaccattcccatgaatggtcatgtgcaaagcctcaatgccagtgtggcagcagccatccttatgtatgaggtctttcgcaatcgactataatcctagaaaggcaatgatatgaaacgaaaaatcttattggttgacggctataatatgattgccttttggcaggagacccgccagctctttcaaaaaagtgagctcgatgcagcccgcaatatcctcctgcaaaaactgagccactatgctagctttgaaggaatcgaagtcatctgtgtctttgatgcccagtatatgccaggagtgcggcagacctatgaggagttcaatgttcaggtggtctttaccggtgaggatgagacggcagatgactatatcgagcgcttggcggcagagcttaacacgcccctccaccaagtatcagtagcgaccagtgacttaaatgagcaatggaccgtctttgctcaaggagctcttcgggtatctgccagagagttagaaaaacgggtcgcagtcgtcaaaggaaacctcaatcaagcgcagcgagtggttaacgatcaaaaaccacccatgcgaccgctcgatcacgaagtattgcgacaattacaagaaatgatgggagacaagtaatgacatttgctattttaaccgattcgaccgcagatttagaccaaaactgggccaaggaacatcaggtgaccattcttggcttgaccattgagttagatgggacggtttaccagacagtaggccaagctcaattgaccagcccggagcttttagaagccatgaaaaatggggccaaaccgacaaccagttaggtcaatgtgggccaatttcaggaaacctttaaacaatttgccaaagaaggaaaagatctgctttatgtggccttttcatcagtcttatctgggacctatcagagtgcagtcatggcacgagacctggttttagaagactacccggaagccgtgatcgagattgtcgatcagaaggctgctgggattggagagggttatctggtcatgcgagcagtagctgcgcgtgatgcaggtcgttcattagcagaagccaaagaagaaatcatggagctagcgccaaaactgcggacttatttcctcgtcgatgatctctaccacctcatgcgtggcgggcgtctttccaagagtgctgcgatcatgggaagtttggccagcatcaaacccattctctggattgatgcggaagggaaattagtgcccatcagcaaggttcggggacgcaaaaaagctgtccgggaattactggagctgatcaaagcagatatcggtgaaagcacagccttggtatcttataccaacgatctagaaggagccgaagcactgaagcaggaaatgctggcgcttgaaggcatcgatgaagtccttgtgatgcctcttggaccagttatttcagcccacgttggcccaaattccttgatcggatttgtcattggaaaagaaaatcgcaaataattttccaaatcggttgacttttatcttagaattttgatacaatagtaggcggtattgtttaccccatttgtaaggccccggaacctttcaaataacttgcggaccggaacatccgccctgtaaacaaaaacgacattcatataggagaaatcatgaacaaaactacattcatggctaaaccaggccaagtagaacgcaaatggtacgttgttgacgcaactgatgtacctcttggacgcctttcagcagttgttgctagcgtgcttcgcggaaaaaacaaaccaacattcacacctcacactgatacaggtgacttcgtaatcgttatcaatgctgaaaaagttaaattgactggtaaaaaagcaactgataagatctactacactcactcaaaccacccaggtggattgaaatcaatctctgctggtgaacttcgttctaaaaatgcagtacgtttgatcgagaaatcagttaaaggtatgcttccacacaatactcttggccgcgctcaaggtatgaagttgaaagtattcgttggagctgagcacactcacgctgcacaacaaccagaagttcttgatatttcaggacttatctaaggaaaggaacaataaagtatgtcacaagcacaatatgcaggtactggacgtcgtaaaaacgctgttgcacgcgttcgccttgttccaggaactggtaaaatcactgttaacaaaaaagatgttgaagagtacatcccacacgctgaccttcgtcttgtaatcaaccaaccattcgcagttacttcaactgcaggttcatacgacgttttcgttaacgttgtaggtggtggatacgctggtcaagcaggagctatccgtcacggtatcgctcgtgcccttcttcaagtagacccagacttccgcgattcattgaaacgcgcaggacttcttacacgtgactcacgtaaagttgaacgtaagaaaccaggtcttaagaaagctcgtaaagcatcacaattctcaaaacgttaatcaatacgattatatcaacgtttacagacattcaagaattatttcttggatgtcttttttgtttcaaaaaatcaaagttcaccccaaaattcaccccatattcaccccatcaattttttaaactacgaaaagcaatatcacctacagtctgattgactttatctttgatattaacgtaagtttttgtaatctctttatcactatgagtaagagcttctgagaaggcttcaagagaaacacctgcttgtttagcaagagtagcaccagtatgtcttagtttgtgtggtgatgctggtgctaattcgggatgtcttcgtctgactgatttcatcttgataaaacttaaaatttttctaattataacgaagcatagtcaaaaagctatgacctctatattcacaaaaaaatccagaccaatactagtccagatttcttgtctattaaacattcttttcaaagaatggaagaacggctgtaacggctttgtcaacgcaattatttaactgtgagaatccgacgcacataaattttaaatggcgtctcagtcacatttaaatttatgagacgcttagacgttaggctttcaatttgtcaaattttgctttgacatttgccttgaattcttcaagtttagccttgcgttcggctttacgttcagccttcatttgtgcacgtgcctggttgtagaggtcttcttggacttgcagagctgcttcgatttcggctacgacggttgctacatcccaacgcacgatttgggtgtcgtacttggtgaagtaagcatcgatgactgcttcgttgttttcttgcaccaaggcgacaacggctgtttcgccgtcgatcaatttttgagacacaacgtcaatcaagccagcttctgccgtatcaacggtatcaccagcagccaaaccatagaggctgccaataccataaccaaacaagacgccgataggaccacccaaaagcccgataactgcaccgagcaagccaccttctagggttgcatccgtcgttgaatcttcaaagtcatagcgttctttttcaacgatgtgaccgttttcatttttgaccaaggcgatttgagcaaccttggtcgtctgagtttggcggaaagccttcaaatccgcaaaggactgataagcttcgctttcagtgttaaagactgaaactactaggttttccatagttagtacctcttttctaaatatatacgttcattataatacagtttcaatcacttttcaatcattttagtgcgacattttaattgatatgtcgcgtttatcagcgtcaaagaacagtttcaggcagcggtatatctttgccatatcccagcccagacactctggcgactctgagtgattatcaagaaaggcgtccagcaacatcttaaagcctcccgtgcaaaaagtaaataaatagtgtttttcctgtatgcctgtcacacggctaaaagaccgcttgaccaaatcttccagaaaattatagcagatattatgtaccagctctgtgtagcgagtctgatgagcgtgccgaatcacatcgacacttttatagaatctgccaactgtttccttatggtcgaatccttgaaagaagtcgctttattcgtcggtcaagacaattaatttggctggtgcaactgattcgccaagctatgaacaagcaattattaccttttgaaagcaaaaatggcaattatgaaggtgaagctactcaggtcttagttcttctatccaattactatgcagacaaaaaactatttgatgaaaatacagatgaatatggaaatatcttgattttaaaggattcatccatcatttctaaattatcggctatcccagatttattaaaaaggggatctagtaggtaacaataatatcgaatatatcaaagtacgcaatattaggatttcttcagaggttgagttagagtcagatgttgatggggataagtcggataatctgccaatagatataaaaatactagaaaacaggcttgaaaaaggctcgtaaagctagccagttctctaaacgttaattcgttgctggacagcagaatacaaacgaaaacactttgcatcttgcaaggtgtttttttctatgagaactggcggtgcgcaattaggatagctctagcgactttagtcgcatagagatatgctatgcacagttgcctcaagaaaacaatgcttcttggtccaccctgttagacaagcttcaaaaccaaggaatccaacagatttctcttgtagttacagatggctttaaggggcttgagcagattatcagtcaggctcacccattagctaaacaacaatgttgcttaattcatattagtcgaaatctagctagtaaagtgaaacgagcagatagagcggttattctggggcaatttataatgatttatcgtgctgaaaatttagaaatggcaggacaagctttagaggactttctcgccgaatggaaaccaaagtataggaaagtcatggaaagtctggagaagacggataatcttttaactttttatcagtttccctaccagatttggcacagcatgtattcgacaaacctcattgagtctcttaacaaagaaatcaaacatcaaacgaaaaagaaggttctttttcctaatgaggaggctctggaacgttacttagttacgttgtttgaagattataatttcaagcaaagtcaacgaatccataaagggtttggtcaatgttctgatacacttgaaagcttatttaattaacactccgtaactctacttaagtgtttacacataattatttacagtatcaaaaaataaagtatattgttttcatcataatataattaaatatcagtatagagaattttatctatatatcagatatcagcaattgcttttgctgtcatttttcgctacaatagttacaaggaggaaataaacatgttaaaagaagtattaaacgtcgcaaaagttgcgaaaaaatcatctctcttcttaggaggggtagcatttgggacgcttggcttgaaagtcttagcaagtaaagaagctaagaaaggctattctaaggccttggctaaagcttacaaattgaaagatggactggatgcatctgtttctgttgtaaaacaacacggtgatgatgttttacaagacgctaaatatttatacgaacaggaaaagaaagaagaacaattagatagcctgacaggtgaataatatgtcttttaaagtgctacacagaggatatcaacatatccgattatcgtcctcgttttcactgaccttggatattcaagattatcttcgttccttggctaaagatgaaaaagggatcgactctattcagttttatatggatcagcagcactttactctacgtatgaaagaaggcttctctgtattagaaaatgcagaggcctttttaaaaaaaattgacaaggggaaagtttcggacttgatgactcttcccattcgtagagaagagagtgcttattcaattgtatcgggtgcagcgattaagcgtttgctgtttcgaagttttgtaccctaccctattcgttatatttggacttgttatcaggctttgggttatgtcaaagaagcctatcaaactttagcgcgcaaggaactaaccatggaggtcttggactgttcggccattttgttgtccttgtttatgaaccaatccaagacagctagcaacatcatgtttatgcttgatttgggtaatcatctggatcagtggtctttaaaaaaaacagcaacagatttggaacaaagccttcttgctaaagaaagtgatgttttcttagtgcggggagacatggtcatcagcatcaagagttctgatgttcaagtaggtgatgtattagttgtctcccaaggtaatgaaatcttgtttgacggccaagtggtttcaggattaggcatggtcaatgagagttccttgactggagagagcttccctgttgaaaagaaagagggagattctgtatgtgcgaatactgttttggaaacaggagagttaagaattcgtgtgactgataatcagataaacagtcgtattttgcaactcatcaatctgatgaaaaaatctgaagagagtaagaagacaaaacaacgtcattttattaggatggcagacaaggttgtaaaatataacttcttaggtgctggtttgacttatctgttaacaggttcgttttcaaaagccatttcctttttattggtggatttttcatgtgctctaaaaatatccacacctgtagcctaccttacggccataaaggaaggtctaaatcgagaaatggttattaaagatggtgatgtattagaaaaatatctggaagtggatactttcttgtttgataaaacgggtaccatcacgacgagttatcctttggttgaaaaggttcttcctttcggagattatactgagaaagatattttaagaataagtgcatgtttggaggaacatatctatcatcctattgccaatgcaattgttaaacaagctgaaattgaaggcattgaacacgaagaaatgcatggcaagcttcagtatgttgcaagcaaagggattaaatcgcaaattgatggtcaatcggttgtcattggaaattatgtactaatgcaagacgaacaggtaagaattagttctgagcagctggccttgattgagcaatataagactcattacaatttattgtttttggcttataagaaagaattaattgggatgttttgtatccacactcccttgagaagcgaggcgaaagttgcattgaaaaagctaaagcgccaagggaaaaaactgattctggcaactggtgatacgttggctagaacagaagagttggttaaagatctgccatttgacaacgtttatactgatttaaaaccagatggtaagtttcagttggttcaggaattacagaaagctggccgaactattttgatggttggagacgggttaaacgactctgctgccttgacgcttgcagatattggggttgtgatgaatgaaagtgctgatatttctaagcagatgagtgatattttattattagataatcgtttagatttcttcgaggaattgaattctttatctgaatcgttgcagaaattaattcaaagaaatattcaagaaacagttgtaataaatggaagtttaattggatttgggttgttaaattggttaagcccatctaatctttcgatattgcacaatctgactactttaagaatcgtccttcgtagtctttctattaaaagtaggtaagagaccgagaagctgaggttataaaaactaaaaggagttgtctcatttgagaataacggctctttgtcaactgtagtgggttggtggaaaattataccctggagaggaccaaattggttctctccttttaaatattgaaaaaaccattggcagtggacatactttaagactatatatttctgaaactagtttcacaatacaaatattgacatgcaattattaattggtggattttaagttgacatctacaaagtttaatgttaaaatacattcaaaaatatatttgaatgaggtgttttatgattcaaaatattgttacttcaataatcctgtattctgggacagccgtagacttacttattatcctaatgttattttttgccaaaagaaaaagcagaaaagacatcattaacatctatttaggacaatttctaggctctgttagtctaatattgctaagtttactttttgcatttgtcttaaattatattcctagtaaagagattttaggtttgctcggtttgattccaattttcctaggactcaaagttttgcttttaggagattctgatggagaagctattgcaaaagatggtttgcgcaaagatgataaaaacctgatttttctagtcgctatgattacttttgcaagttgtggcgctgacaatattggtgtctttgtcccatattttaccaccttaaatttagcgaatttgatagtgactttacttacttttctagtcatgatttatctcttggttttttctgcccaaaaattagcacaagtcccttctgttggagaaactttggaaaaatatagcagatggtttattgccgttgtctatttaggattggggatgtatatcctgattgaaaacaacagctttgacatgctgagggctgtgttcggctaggagaaaaaattatgaaaaaagatagtatctgtcaagtggatgttattaatcaacaaaatgttacaaccgcaacgaactaccttgaaaaggaaaaagtccaaaaatcacttcgcattttatcaaaatttaccgataataaacagataaatatcatcttttatctccttgccgtcgaagaactctgtgtctgcgatatagcctgtttattaaatctcagtatggcatctgcctcccaccatcttcgtaaactagccaatcaaaacatcttggacactagaagagaggggaaaattatatattattttataaaagatgaggaaatcagagatttttttaatcaactaggataacaactatttttactacttttccatgattatagggagattatatatgaaattttttgatgaaaattactcacaagaaatacctactcgtattaaatgtttaagaaaaaagtataatttaaagcaaagcgacctaggtaatgcaggtcaagttaggcaaattgaaaagggagaagtttgaaagaatttgtatcttttattttttgtttcatttatgccctatgctactggaatagttagtagtcatttcatgaatcgtacggcacagctcttttatggactgatcgttattgtttcaacggtagtaaactggtttttacataaagtaattgataaacccaatatagatcagaaagaattacttgaagctaccgcacaatataggaagttattgatacctgacctaataattaaaggagtgggattgattctatccttaattctctatcctccgattatgatgtatagtgttttaattgcggcattttacatcataactttaaaaacactatacgaaaaaagagtgaataactaaaaaacggtgaccaaagttaggtgtattattttaatgcttagagacctaaactattcccctattttaaaaatattgattcagattttatgaaattaatcagtagatatcgttctgaaaagccttgataatacgctgtttttagtccaactgaaacccatactttccaaaccaggcttgaaaaaagctcgtaaagcatcacaatttagtaaacgttaaaacttatttaaacttattgaaagcatttcgtatcaaaaatacgggatgctttttctgttcaccccaaatttttgtaactaggtgatacttgaaattaatacaaatttggttgtttttgataaatctaagcaacactaaatgatgaagtgaaaggggatgaatctttgatagtattcatttattgtgaaatatgatatatttattaattagatggatgaatacttctagagttaaatatagcataatagggacagactttttggtttatttttgtttgtagtcggattatgaaagaatatccaatattatgcgataagatagaatgttacaaaaaagaaaggggatgcaatccgatgaagaaagacagattaattgtattgacagatgctgttctagcaattattatgaccatcttgattttagagttagaaaaaccaacaacaccaagtcttgaagctttttgggatttacggcaaaatttctttgcttgttttctttcctttttctggttgggatcgttatggatggcactaaacacattatgggaaaaggttgagaaaatttcctcagaaattatttggtggaatttgtttctactcttggagcggcaggagttctctttggagaatttcatgccatccaagataccagtctgaatgatgtggtggaccggatctatataaatgtcaaggatttaccgtttcagtccttgggagctttagctaatatcctgtctgatgttaagaagggactgattcaagacagtcatatctggtctttcttccagtcatttttcaaacaatatcagttgataatcagcttaaatcagatctatcagtttgtctatctttctctgatggagatcatgtcctatcttcactttgattattggaaaaaacggctcggtcaggagctagtatgaataaggagaacaaatgagacgtttaaaaatgttatggcatattatacaggttacgggttttactcggtttgctctgagttttgtgacctttgtttttgggtcaggaggcgtgcttttcctagttgaacctgctatcacaaattacggagacggtctttggtatgcttttgtgacttcgacgactgtcggctacggggatctcctagctgtgaccttgattggaaggattaccagtgtcttcttgacgatttatgggctcatattttttggctgtttatcagctgttattattaattattataccgatttaaataaggaaagaggagaggacaaatgactgccaattattcaacacgggaataccgtgagaaattatacgatgaccttcatgttcgattgagagatacagcgattttgatgtgtgcaatttttattgcctctatcggtctaaatatgaattcaacagctgttattattggagccatgttaatttcacctctcatgacaccgattgttggactgggattcggtttagctatttttgatacgcgtttaatcaagcaatctctagaggttttattgactcaagtgttggtcagtttgcttgtctcgactctgtatttctggatttctcccttgtcttatgcaagtagcgagttgatcgcacgaacctctccaaccatttgggatgttctcattgctattgctggtgggattgctggtgtgatcggttcaaggaaaaaagaagcaaacaatatcgtgccaggagtagccattgctacagctttgatgccgcctatctgtactgctggctatggtttagctaatgggaatgtacgatttttattgggggctctctatcttttcttgatcaactgtgtctttatcatgctagccaacattgttggaacaagaattttgatgagaaaatctcctttaacttcatttaaagagctgagcattaaaatgagaattggcttgatttctttgattgtattgttgattcttccagctagctattcggcagttactctgacaatagaacaagcgcgcaaagaagggatcaaacagtttgtaggaaaagagttcgccaattatacggttattaatcaagtctacaagtcaagtaacaatgaattggtcttgacggttgttggagatccgatttcagaagaagaattagaaacactccaccaaaaacaagcctcttacggtattcaatctgttcaattgaaagtgaatcaagttcagaactcgccaacattagatagtgaagcgaccaaggaattttatgaaaacattgacaagtatattgatcaaaaactctctgaaaaagattcacaaaacgatctcgtaaaagaaaatgaagcagacaaggattgaggacaatgaactgaatcggtttttacgccgtgtttttcttgtatcttcctctttcttacttatagcaggttgtttttgcttgaataagaaataaattagaagttctatcatctaagaaaaatgatgaaaaaaatcatttaactaatggtgtgaacgtttagtgtttatcagctccattctctgtaattttgggggtaaaatccacaccatttagataaaattagttgaatttgattggaaaaacgcttttataaaagcggagaaaagtcttgatattacgctgtttttagtccaactgaaattcatactttccaaaccaggcttgaagaaagctcgtaaagcatcacaatttagtaaacgttaaaacttatttacagatattgaaagcatttcgtattcaacatacgggatgcttttctgtttggcttaatgttacaaatttgcaattatgttataataagtaatatggttgcatgaaaaaatggtggataatcaattagatcggaggcgactaatgagaaataaggttactaaaataattgctattgtaatcattcttatatttggaggaacatatatgtataataagctgactaaaccaaatcttggccccaaaacagccaaactctatcagcatggctttcgtttgctagaagagcaaataggaacctacatcaaagaacactatagaggtattgagaagattgaattttccccaatatacgttacagaggaagggtcaacattctcaaatgcgtatgtccgtccaactatttatgataagtatggaaataaggctactctaggaactccaattaataactataatccaagcagttttggtatcgtttctcatgttcttctcaattttgatggaggcgggaatgaagctatagatttaaaggactccaatggaaataatatcgatgtttctaaagcacagcacctgcctgatgaagcaaaactaattagagaatcctctacggatggtaatattaaattattggttgataatggtcaattaaaaggggtagtaaaagatgaaaaaggaagtccatatgctgagattgtttataatgatgacttaagaaaaggagatatataatatggctttatctaatgaagaagtacagagattacagtttggtcttaaaaataatgttagggaaaagccaggaaaagtactaaattataaaataaatggtgaagacagatatttccaaatcgttaacagcatggatgctactacccaagcaattgcctttgtccctgttgatgatccaaaaggtaataatccaaattatcaagaaacaacgatagttgttgctggaactcaaataccctttgaaaattctaaagaattggggaatcaaccttatttttttaaaaagaatagagatattgttgattcgtctgaaagagcattctttgctagtggggcgtttggtatatttccaggaatgctaactccccaagcagatgatattgatatgttttatcaaattactgaagagaaaataaaatctcataatggtataatttctaatatgtctgggcatagtcaagcaggacctggcgtagcttatacagcttcaaagtatggccttaaagagaatcggactattaaagttacaaatttcatggatttcgcagctaaaaaagctgtagatacaggtggtatttcaaaggaacaggtagcctatcttaataagaacgctacgatctatagagatagtagaagggacgttgttaaacttgatggtaatggtggtgcagttccctatggaaaaacaatgatgtttgaagttattggagacgaagatggacattcaccacgaacacctgtattaaagggaaatgctttagatatcgattattattataaaaaaaaccttttcgcctctggcatgactgaaaagcaggtccgaaagatagcggaatataaagcaaagaattttaaaccaaatttaggaattgttaattatgggttagaagatatttttgataggccggagttttatattaacgggtatttaaataattacggtccttttgctcctgaaccaactaaacaagatttaatcactttaaatatcaaacaaataaaagagataaaggcctctttgaagtctagttctggtagtaaaaaaattagtttaagagaagaattggtccgagtaagtgcggaaaccacgaaacttcaagctgaggtttacgaagaagaaattaaatcaaaaattgaatctgaaaaggaaaaggtttctcaaaaaatttcatccctcaaatctgaagcatatagtattgctcgtcacttatcatctagtgaagtagaggttctattatctgaactaagtttggatactgcatggaacagtgggaaagagacaaaaactatcacttcagcaagcgattataggaatagaatgtctcaaatttcagataatctgaataaagttgctgatagaattattgaaagtgatcaaataggtgccaagatttttagcaattaaaaggagttaatgaatgattgaaccgaatactgaagatcgattagaagcagagcgcataaaaactgaatacatgaaagttcaagaacgattggcaatccaggctctagtttcagcaacaaaaggtgtcctaatggctgaaggggctattttacaaacttggctggctaatcaggcgtttaaaatgcagaattttgccacttctcaagtacctgcttctctagaaggaggattaactgggggtgctgctgatgcaattaataaaactttaactgaagtacctgaacctgatctgtccagcccaatactttaggagaatacatgaatattaatgataaaattaataaagtcgagagtgatcatcaagctttcagaagaaaagtagcagattatgaattagattatcaagatatgaagcgagatgcaaaaagactatatgaagatataactgactttatcatctcctattgtcataaacataatcaagaacttccaatacatgaattgcagcaattagaagaaaatagagataattttgaaaagagaatttctaggtttgaaactagattaagccaaacgtatcaggaagaaaataaactttataataaaagcatggaatctcttgaagaagaaaagaagaaggtgtaactcctatcactatttataatactttatagtaatactacttgctccaattgtccgaaaatttgtgtaaattccaaattgaaaatgaactaatttttgatagcgattccttttatttataaatacgtcaactcgttgtaaagattgtttgatcaagattttttggagaatccagatgttgtttttttctctacctatttttctaaaactgagaaaaatctgatataataagctttgtaggtgtgttatatcaatacttacagaactaaactattcccctatttaaaaaatattgattcaaattttatgaaatgaataagtagttttagttctgaaaagacttgatattacgctgtttttagtccaactgaaactcatactttccaaaccaggtcttaagaaagctcgtaaagcttcacaatttagtaaacgttaattcgaaagaattacaatatttacaaagaacacctttcgaggtgttctttgtatgttttcatactaaattgtggcagttgatgtagttgttgtggctttagccacttacaaatacggctgcaattcgacgaagtcaattgcctctaaacgttaattcgttactggaatacagaatacaagcgaaaacattttacatcttgcaaggtgtttttatctatgagaactggcggtgcgtaattaggatagctctagcgactttagtcgcgtagagatatgctatgcacagttgccccaagaaaacaagcgaagcgatatttgaatggatagcaaccactgcacgcaaaatgttaattcgaaggaattactatacttacaaagagcacccttcggggtgttttttctatacctaagataaatggaaaataaaaaaccaccctatctttcacagtcaaatgtgactgtagaaaatagagtaggtctaggatgttaaagactatttgtcgtctttatgaaagatatttttaacgcccttgatagctccttcaacagcttcttttgcatcttcagcaacttcttttgcttttgaagcaactttttcagcagtgccttcagcttctgtttttgtatcgccggttaatttaccaaggccttctttaacagaaccttttgcttggttcaatttttcttctaatgacatagcgtcacctccatgaagttagtagttttttctctgaatacaatactgttgatttaaaaaaataaaaaatatttgtctcagattagaatgagtatattctttttaaaatagaaagtcaaatttttgctacggctaaaaaacaggatcgctttccggtcacgaataatgaccgactaataagtcacgatatttcgtttttccagcaaagatttgaaacgaaagaagcaaaaaacttttctgtctccattgaattacatggtataatggtcgtgaatggagacatcgtaacgctgttttttgaaaaagagaagataaatatgaaaagaatccttataacctatcctgttatcagtactttagctctaatctgtttgctgctcggtctattgacttccttttatggggatgctatgtatgacctattggcttttcattcaaagccggtgtatggttggcaatatgttagtgggaccctgatgcacggtagtaaaggagcccctatctggtttttatgggtccatttgttgttaaatggactcatgctccttcccttcggaggactgctagaaagaaaaataggctctagacaagtcttgatcgtttttgtgacggcgacagtcctctcttccatcgtttttcacctcttaacccaggagcaggacattcaggcaacagggatctctgctgtaggatacgcctttgtgaccggaggagtcctgctcctgccaaagatgtggaaagaattttcactcaccgtaaaatggttttatctattcttaatttttctatctggcctcatgttcttaccagcaatcaccggatggatctcaacgctattgcatctttcaggggttgtgagttatctattggtttttatcggaagtaaagtcttggaggggagaagctaactattaagacggctcctcagtaaggttttcatcgtacttccttgactcttcctttaccaggccgtataatattctatatcaatgaagaaatcaccttttgtcattgtacaaagggtgattttataacgaaaaaaaggagacacaatggggtatatctctactattaaaacggctgttcagctctttcctttcctggcatttttgctgaccttgccctacatgattttgaattatcgaaaatatggttcggtcaataaattgcgggtgctgattttctattcttttatgctttacttgatgacggtctatctcttggtgatcttgcctctgccggatccaagtaagattcatactagctactcggaaatggtcaatctccatccctttgcttttgtggtggattttttcaaggagagcccctttgatttagcgcagactggtacttggattcaagctcttaagcatccaactttttatgtgcctgcctttaatgtcctgatgttgattccttttgggatgtatctgcgctattatttcaagtgtggttttaagaaaacgatccttctggcagctctctttagtctctttttggaactgacccagttatcaggtctctactttatgtatccgggtccttaccgcctggcagatgttgatgatattattcaaaatactaccggtggtggagtgggttatctgctcggttggttcctggtttggttattgccgacacgagacgaaattgacgagcattctttccgagtaggaacgaaagtatctggttttcggatgggtcttgccttcttgatcgactttgtaatgctatccttgctttacgcggtaatcgagcgtttagagacgattccttatgtagcgattttggctgtttattttggtttgattcctttgtggcggggcaaaaccttgggaatggctttattgaaattccgcttgcattttgacaagcaaaaatggcttcgcaccatctggcggggaatcctggtagtaggttatttctatctgattcctcaagggttgttctatttgatttcgctcttgaatagcgatttgacggacaattctctcttaaccctgtccatgattttattgctcttctttgtggttttattgtacctgattctcactcttgccatcgtcttgctcaatcgtcgctttccctttgaccgtctagctgtggctgagtatgagagtacggtgcgcgtgaagaaagagctcttaaaagatgaaactgaatcgtcaaaataaagagagtgggacagaaatcggtaattcgttagaattcgatttcgtcgtctcacctccgcacagttgagtagggctgtaaaagctgatgaaatcagcgtagtagagcccactcaaccactgcgtcttgctcgacaatccaaaaaaaataaagaggctaggacttttgtcccagcctctttatttttttatacacgtttaatatatccgaacattcccagttgagaagggccattttaaggggattgtgctacaatggaagcaaatagatagaatggagcagtgaaatgaaagcaattattacagtcgttggaaaagaccaaaaaggaatcgtagcgggtgttgcaacgaaagtggcagaattaggactcaatatcgatgatatctctcaaaccgtattggatgaatactttaccatgatggcggttgtatcgtcagatgagaaaaaagatttcacacagctccgttcagagttggaagaattcggtcagtctcttcatgtaaaaatcaatatccaaagcgcagcgatttttgatgctatgcacaatttgtaagataggggttgagaatttatggacattaaacaggtaacagaaaccattgccatgattgaggagcagaacttcgatgttcggaccatcaccatgggaatttcgcttctcgattgtattgatccggatatcgaaaaggcggcagaaaaagtctacaataagattgtgacaaaggccaaagatttggtggctgttggagatgagattgcggcagaactgggtattcctattgtcaacaagcgggtttcggtcactccgatttctattatcggggcagcaaccaatgcgacagactatgtgccctttgctaaggcactggatcgtgcggccaaagaagttggggtcaactttatcggtggcttctcagctcttgttcaaaaaggctaccaaaagggggatgaaatcctcatcaactccattcctcgcgcccttgcagagacggattttgtctgctcttcagtcaatatcggatcgaccaagacggggatcaatatgacagctgtccgagatatgggccgtatcattaaagaagcatcccaagcagatccaatggggcctggtaagctcgtagtttttgccaatgcagtagaagataatccttttatggcgggtgccttccacggtgtcggtgaagcggatgttgtcatcaacgttggggtttcaggaccaggtgtcgtccaacgggcgattgaaaaagttccaggagctagctttgatgtattggctgaaacagtcaagaagacagctttcaagattacccgtgttgggcaattagtggggcaaatggctagtgaacgtctcggtgttgagtttgggattgtagacttgtctctcgcaccaacaccagctgttggggactcggttgcccgtgtccttgaagccatggggcttgaagtggtaggaacccacggaactaccgcagcgctggctctgctcaatgaccaagtgaaaaaaggtggcatcatggcttgtaaccaagtcggtggtttgtcaggtgccttcattcctgtctcagaagatgaagggatgattgcggcggtccaatcaggtcatatcaacctggaaaaattggaagccatgacagccatctgttccgtcggtctggacatgattgccatcccagctgatactccagatacaaccattgcggccatgattgccgatgaagcagctatcggggtgatcaaccaaaagacaacagccgttcggattattccttatggaaaagaaggcgatatgttagagctcggtggacttcttgggtctgctccggtaatgaaggtcaacaaagcttcgtcagctgatttcattgcccgtggtggtcagattccagctcctgttcatagctttaaaaactaagagaaatctagtataatagtagaaaatagaaaagtctgtgatgatgaaactccagacttttttcttgcaaaaggagacaagatggctaaaacaagattatttgtgattcgtcatgggagaaccatgtttaataccattggccgtgctcaaggctggtccgatacacccttgacagcagaaggagaacgagggattcaagctctaggaatcggcttgcgtgagtccggtttggagtttactcgagcttattccagtgattcaggccgtgccattcagactatggggatcattctcgatgaattgggcttgaaagaccagattccttatcgctttgacaaacggatccgcgagtggtgttttggtagctttgatggagcctacggtggggagctctttcacggtgtcgtgccgcgcgtgctagatgtagaagactataagaccttgaccttggaagacttggccaatggcatctgccaagtagatacagcaaattgggctgaaccatgggaagtcttgaaaaaccgaatcctagaaggttttgaagccatcgccaaagaagtagaagaaaatggtggaggcaatgccttggtggtcagccatagttggaccattcagaccttagtctgcttggtcgaaggaaaaccaaatctcaatctgcctctttcaaatggtagtgttacccttgtagaatatgaagatggagtattgacggttaaggggttcggagatagcagttaccgtgaggtcggtgaaagtttgcaagaatcctagtccgtcctgaaaggctgaccctttggtcatggccttttctttttctcacaacttgtaagagctttcctactttctttttgcaaaaaatgatataatgaaagagatacatacggaggtaatacaatgacaaaaaccagattatatattgctcgtcatggaaaaaccatgtttaataccattggacgggcacagggctggtcagacactccgctgacagaagcaggagagcgtggaattcgagaattaggacttggtctcaaggaagctgggctttcttttgaagaggctgtttcgagtgattctggacgcaccattcaaactatgggaattattcttcaagaacttggtctgacaggaaaaatcccttatcgttatgacaaacggatccgtgaatggtgttttggtagcttcgacggtgcctatgatggcgatctcttcatgggagttttaccccgtgtctttaaggtcgatgatttccatcagttgagcctgatggagttagcagaagggatcgtcgaagtggataccactggatgggctgaatcctggggtaccttgagtggccggatcctagaaggatttgaggccattgcaaaagaggtagaagcagctggtggtggtaatgctattgtggtcagccatggtatgaccattacgaccttgatttatctcatcgatccaaaagcggtcgaagaattggtcttggacaacggaagcgtgacggttttggcttatgaagatggtgctttcagtattgaaaagattggggatatgtcctatcgtaaggttggagcaaaacttctagagggtggccatgacgaataagtatagacgcgcaagaaaaaaacgtaagaaatggtggccttacctattgagtttctttcttcttgtggtccttggatcaggaattggtgtttacttagcgaaaccaagcttgttttcaggacttcagttttggaaggctaaaaaaacagctgtaacgactccctcttcttctaagaaaaagaaagaaaaatcagatttaccagccgtttcgacaaaagactggcagttgatcttggtcaatcgtgacaatgtgaagcctgagctgaacccacaattgacagatgtggatgctatcaaagtggatagtcggattgtagaaccaactcgtcaatttttagaagcggctcgaaaaattgccccagaagaaaccttgatatcaggttatcgaagtgtggccgagcaaacagagctctataatgagcgtgttgcgcaactagaggctagcggcctttcgcacgaagaagctgaaaagcaggtgcagacccaggtacaggtccctggtgcgagtgaacaccagacaggacttgccattgatatgagtgtcgaagctggccaaagtgatgagttgggcatgcagctggctgccatcgcaccgcaatatggctttgtgcttcgctacccagatgggaagagcaacatcacgggtgtgaattttgagaattggcatttccgttatgttggcgtagaaaatgctcagtatatggccaagcatcagctagtattggaagaatatattcaactattgaaaaaggctggaaaataggaggagattcactttttctaggtcttcagaatgatttttagcactcttgaaaaaagagtgctaattttttggatttttttcttgactttcttttggatgggtgtataatagaatcatggtttagcacttgagcgtttagagtgctaaatacgaaagagaggtgaggtcatggttacagaacgtcaaaatgagattctaaatcttgtcgtcgatatctttaccaagacccacgaaccagtcggttcaaaagcactgcaagatgtcattcaatccagtagtgcgactatccgaaacgacatggctgccctcgaaaaacaaggcttactagaaaaggctcacacttcgagtggccgaatgcctagccgggctggttttcaatattttgttcagaactcgcttgatctagagttgattgatgaacaagatgtctaccaggtggtgaaagcctttgatttcgaagcctttaagttagacgatatcttggatgctacggccaagttactagcccagatgacgggttacaccgcagtgattcaggatgttgaaccgacacgtcagcgcttgactggttttgagattgttccattatccaaccacgatgccttagcggttctgaccttggatgaatcaaagcctgtcactgtccagtttgccattccaaagaatttcttaaccagtgacttggaaatcttccatcagctagttcaagaacgtttcattggaaatacagtcttggatattcactaccgtttgcggacagagattccacagattgtacagcgctatttcaagacgacaaacaatgtcttggatctctttgattacgtcttctcgcaactgtttcaagaactggtctttgtagaaggaaaggtttcatccttaacctacgccgatcttcagacctatcagtttttggataatccccaacacgtagccttggagttacgagggggaatgccagaagatcaaatgacccagatcctggttgcggagtctcaagagaaggccttgaaaaatgtgacggtcattagccacaagttcctggtgccttatcgtgggatggccctcatgcatgtgatcggtcccgtagagatggattacaggcgtgtgattagcctggtcaatgtcatcggacgggtactggttatgaagttgacggactactaccgttacctcaacagcaaccattatgaagtaaattaagatcaaatgaaaggggtgtatgccttgacagaagatatcaaaaaagaagacgtgaaagaagaggaagttgcccaaacaactgaagaagttgtagaggaaagcaaccaaccttctgagttagaagaagcacaagcgcgtgctgaggaatttgaaaacaaataccttcgtgctcatgcagaaatgcaaaacattcagcgccgtgctaatgaagaacgtcaacaattacaaaaataccgtagccaagatttggcaaaagcgatcttaccatcactggacaacctcgaacgtgcccttgccgtcgaaggattgacagatgatgtgaagaagggcttggaaatggtccaagaaagtttggtacatgctctgaaagaagaaggaatcgaagaaattccagcggacggagaatttgaccataactaccacatggccatccaaactttgcctgcagatgatgaacatccagcagacaccatcgcacaagtcttccaaaaaggttacaaactccatgaccgcatcttaagaccggctatggtagtagtctacaactaggctaccttgtccgaaacgacactaaactatgaaagaaagataagacgcaagccggaggcttgcaaggaagatatttcccgccgtggtgaaagtttcagtagcttgtgctactgaaacaggggatttttgagacagtaggctcaaaaataagtgatgaaatcccgaagggagttgctcacgtccccaccacttaagggaaatatcaaaaaaggaagaaaaacttaaggagaaaaacatatgtctaaaattatcggtattgacttaggtacaacaaactcagcagtagcagttcttgaaggaactgaatcaaaaattatcgcaaacccagaaggaaaccgcacaactccatctgttgtgtcattcaaaaacggtgaaatcatcgttggtgacgctgcaaaacgtcaagcagtcacaaacccagataccatcatctctatcaaatctaagatgggtacttctgaaaaagtttctgcaaacggtaaagaatacacaccacaagaaatctcagctatgatccttcaatacttgaaaggctatgctgaagattaccttggtgaaaaagtaactaaggctgttatcacagtgcctgcttacttcaacgatgcacaacgtcaagcaacaaaagatgctggtaaaatcgctggtcttgaagtagaacgtatcgtcaacgaaccaacagcagcagcccttgcttatggtttggataagactgataaagaagaaaaaatcttggtattcgaccttggtggtggtacattcgacgtatctatccttgaattgggtgatggtgtctttgacgtattggcaactgcaggggataataaactcggtggtgacgactttgaccaaaaaatcatcgactacatggttgaagaattcaagaaagaaaatggtatcgacttgtcaacagacaagatggcgcttcaacgtttgaaagatgcagctgaaaaagcgaagaaagacctttctggtgttacttcaacacaaatcagcttgccattcatcactgcaggcgctgctggacctcttcacttggaaatgaccttgactcgtgcgaaattcgatgatttaactcgtgaccttgtagaacgtacgaaaactccagttcgccaagccctttcagatgcaggtttgagcttgtcagatatcgacgaagtcatccttgtcggtggttcaactcgtatccctgccgttgtagaagctgttaaagctgaaactggtaaagaaccaaacaaatcagtgaaccctgacgaagtagtggctatgggtgctgcgatccaaggtggtgtgatcactggtgacgtgaaagacgttgtccttcttgacgtaactccattgtcacttggtatcgaaacaatgggtggagtcttcacaaaattgatcgaccgcaacactacaattccaacttctaaatcacaagtcttctcaactgcagcagataaccaaccagctgttgatatccacgttcttcaaggggaacgcccaatggcagcagataacaagactcttggacgtttccaattgactgatatcccagctgcacctcgtggtatcccacaaatcgaagttacatttgacatcgacaagaacggtatcgtatctgttaaggccaaagatcttggaactcaaaaagaacaaacgattgttatccaatctaactcaggtttgacagacgaagaaatcgaccgcatgatgaaagatgcagaagcaaacgctgaagcagataagaaacgtaaagaagaagtagaccttcgtaacgaagtagaccaagctatctttgcgactgaaaagacaatcaaagaaactgaaggcaaaggcttcgatgcagaacgtgatgcagctcaagcaggattggatgatcttaagaaagctcaagaatcaggtaatcttgaagaaatgaaagcgaaacttgaagccttgaacgaaaaagcacaagcattggctgttaaactctacgaacaagccgcagcagcgcaacaagctcaagcaggagcagaaggcgcacaagcaacaggaaatgcaggcgatgacgtcgtagacggagagtttacggaaaaataaaatagtccagtggactattttatcccgagcttgaaaatcggagagcgaggcgttaataatggatactcactcttgtgattgtcactctacggcaatcgctatggcgcctttcctaaacgcctaactagtaaatgataagaagaaatccagaggttgcaacccagcctctgtttttcggtaaaatagaggatgttgcctatgaaaaaagtactttgcttgatttatcctaatttttctctttatgagataactgctttaacgagtactttagctctgtcttttgatagtacgattgattttgctgcttcagatcattcgatagtggtttctgaggatggcttgccttgtcaaccaacgaaaacactagatcaaatctttatagaagagtattcttgcgtgattttgccaggaatggtcaacataggccctgtcctacaggatgagaaattgatttcgttcttgagggaccttggtgagcaagatatcctcattgcagccatttcttcagcgcctcttttattagcgaaagcaggtctgttgaaggatacgaaatttacaggtggaatttggcaaaacttctttgactattttgaatttcttccacgtgagaatttccaaccgaaagtccttgtgcaagataaacagatcattacggctatcggttttgcccatcaagagtttgcaagaaaagtgattctaagtttaggcttggcagagaatacggacaactattttaaggaacagaacgagtatgctgaagaggatttgatatttactctatcagaccaagagtttgatcaagtgaagcggagtatagaaaacagcctctaaagatgtacgtaaaaattatagaaaggaacaaagagcgttcggggaattgaactcgagctctgaagtttcttactcaatatgaaagaaaggaacaaaaagtgttcgcaatcgaacacgggctacggactgtgccaaaaagatagttttttctaggacgcaagcgtccgtcgtcaaaactcctattttggctgtgtccgtttaacgccctttgtatcttgaattatgaacaatactgaattttatgaccgtttgggcgtttcaaagaatgcatctcaagatgagatcaagaaagcctatcggaaattatctaaaaaatatcacccagatatcaacaaggagcctggtgctgaggaaaagtacaaggaagttcaagaagcttatgaaactttgagtgacgagcaaaaacgggctgcttatgaccaatatggtgctgcaggtgccaatggtggcttcggtggcggagcaggtggttttggtggctttgatggtgctggttttggtggctttgaagatatcttctctagtttctttggtggtggtgcaagtcgtaatccaaatgcacctcgccaaggggatgacctccaatatcgcgtcaatctcaagtttgaagaagcgatttttggtgcggaaaaagaagtcaagtaccatcgggaagctagctgccatacctgtcatggttctggagctaagccagggactagtccggtgacctgtggacgctgtcatggttctggagtcatcaatgtggatacgcaaacccctcttggtatgatgcgccgtcaagtgacctgtgatgtctgtcatggtcgtggtcaagaaatcaaagatccatgtacgacttgtcgtggaacaggtcatgaaaaacaagctcatagcgtgaatgtcaagattcctgcaggagttgaaacgggtcaacaaatccgtttagcgggtcaaggagaagctggctttaacggtggaccttatggtgacttgtatgtcgttgtcaatgttgagccgagcgatcgcttcgaacgagatggctcaaccatctactacaagttagacttgaactttgtccaagcagctcttggagatacggtccatgtgccaaccgttcatggagatgtcgatttggtcattcctgaaggaacccaaaccggtaagaaattccgcctccgtggaaaaggggctccaagcttacgtggtggtgccatgggagatcaatatgtatctgtcaatgttgtcaccccaactggtctaaatgacaagcaaaaagaagcccttcaagcttttgcggaagcaagtgatttgaaggtcaacccaaagaaaaaaggcttctttgataaggtcaaagatgctttagatgacttataagaataaacgagtttccttttgactaaggagctcgttttattttggacagtcttcaagaaccttctattttgtttgcaaaactgtacccggacagtttagttttttcactcttgtaaccccttctatatcctgctaaaataaaaccatgacacgatacaaagcaaccatttcatatgacgggaccttgtttgcagggtttcaacgccaaccgcatgcccgtagtgtgcaagaggaaatcgaaaagaccttgacgcgcctcaatcaaggaacccctgtcaccgttcatggagcggggcgaacggattcaggtgtccatgctcttggccaggtgattcattttgatctcccccaagcgcgagacgaggaaaagcttcgctttgccctcgatacccaaaccccagaggatattgatttcatccgagtggagcaagttgcagatgactttcactcacgctacaagaagcacagcaaaacctacgaattcatcgttgattatggtcgtcccaagaaccccatgatgcgccactatgccacccactatccttatcctttggatgtggaaaaaatgcaagcagccatccaaaagttggagggaacccatgatttcaccggtttcacagcttcaggaaccagcgtggaagataaggttcgtacgattacagaggctcgcttggtcgaggatgcagaacatcatcgccttgtctttaccttttcgggcaatggctttctctacaagcaaatccgcaatatggtgggaactttgttgaagattggaaatgatcggatgccgatcgagcagatcgatctaattttagaaaagaaggaccgcaatctagcaggtcctacagcagcgccaaatggcttatatttaaaggagatccgttatgagtaatgaattgattctagctatttcaggaaatgatatttttagtgggggaggtcttcacgcagatcttgcaacttatacgaccaacaaacagcatggttttgtggcagtgacttgtttaaccgctatgacggagcacggttttgaagtgattccggtggatccgacgacttttgctcaacagctcaactctctcaaggatgttcctttttctgccattaaactcggtcttttgccaaatgtccaagtggcagacttggccttggactatgtcaaagcccatgcggagatccctgtggtactagatcctgtcttggtctgcaaggaaagccatgatgtagaagtttcagctcttcgagacgaattgattaagttcttcccttatgtgaccatcatcacgccaaacttgccagaagctgagatcttgacccaaagcaagattcaatcgctcgatgatatgaaggcggcagcgcgcaagctccacgaattaggagcagcgaatgtcgtggtcaaaggaggcaatcgtctcaataaagaaaaggccatcgatgtcttttatgatgggacagacttcaccgtcattgaagagccagtcttagaaaagaacaatacaggagctggttgtacctttgcgtctagcatttccagccagttggtgcaagggaaatctccacttgaagctgttaaagcctctaaagactttgttttccaagcgattcaacattcagaccagtatggagtagtacaatatgacatctaatcgaactcaactcattgcccgcctctctattttgacagccttgacagttgtacttggctactataccaaacttccaactcctacagggatcgtcaccctgctagatcttggagtgtatttcacagccttctattttgggcgcaaggaaggtgctattgtaggtggtgttggagccttcctacttgacctgatttcaggctatcctcagtggatgttctttagcctcctctttcacgggggacaaggctatttcgctggcttcaagggaaaagctcgttacctaggcttgctccttgcgacagtcgtcatggtaggcggttacgcactagcttccgctctctttttaggcaatggttggggggctgctatctcggatattccgaataacctcgctcagaattttgttggaatggctttaggctatgtggtctattatgcatttcaaaagaaaggaagctaattcatggatctggagcaactgaagaaggatacaaaagaaatcttggtagatgtcttggaaaaaagccgtctccaccaaggacagatcctagtcctcgggatgtcttcaagtgaagttgcaggagggcaaattggaaaggcctccaacatcgacattgcagaagttattgtccagaccttgctagatgagttgaatccaagagggatttatctggcggtacaaggatgtgagcatctcaatcgcgccttggtggtcgagagagaattggcggacaagaaggagctagaaatcgtcaatgtccttccgagtctccatgcaggaggtgctggacaactcgcagctttcaagtattttaaggatcctgttgaagtagaattcatcacagctcaagcggggttagatatcggagatacctcagtggggatgcatgtcaaacacgtgcaagttccaattcgccctatcttgcgtgaactaggtggagcccatgtcacagccctcgccagtcggccaaaattgatcggcggcgcccgtgctctctacctcgatgatcccatccgaaaatcataatcagaactagcttttaagggctagtttttttggatgaaaagggaggcaaaaacgttttaaaacttgcaatttcaaagttttgtggtaaaattataaggaatgactatattattttaaggagagacagaatgtctgtatcatttgaaaacaaagaaactaaccacggtgtattgactttcacaatcagccaagagcaaatcaaacctgctttggaccgtgtgtttgagtcagttaagaaaactttgaacgtacctggattccgtaaaggtcatattccacgtccaatcttcaaccaacgtttcggtgaagaagctctttaccaagatgctttgaacgatcttcttccagcagcatatgaagcagctgttaaagaagctggaatcgaagtggtagcacaaccaactttcgatgttgtatctatggaaaaaggtcaagactggacattgacagcagctgttgtaacaaaacctgaagtaaaattgggtgcttacaaagaccttgaagtatcagtagaagtttctaaagaagtaacagacgctgatgtggatgctcgtatcgaacgcgaacgcaacaacttggctgagttggttgttaaagaaggagctgcggcagaaggtgacacagttgtgatcgacttcgtaggttctatcgacggtgttgaattcgacggtggtaaaggtgacaacttctcacttggacttggttcaggtcaattcatcccaggtttcgaagaccaattggttggacactctgctggtgaaacagttgatgtcatcgtaacattcccagaagactaccaagcagctgaccttgcaggtaaagaagcgaaattcgtgacaactatccacgaagtaaaagcaaaagaagtaccagctcttgacgatgaattggcaaaagacatcgacgaagaagttgaaactcttgctgaattgaaagaaaaataccgcaaagaattggcagaagcaaaagaagaagcatacaacgatgcagtagaagcagcagcaatcgatcttgccgttgaaaacgctgaaatcgttgaacttccagaagaaatgatccacgaagaagtacaccgttcaatcaacgaattccttggaaatatgcaacgtcaaggaatctcacctgaaatgtacttccaaatcactggaacaactcaagatgatcttcacaaacaatatgaagcagaagctgaaagccgcacgaagacaaacctcgtggttgaagcagtagccaaagcagaaggttttgaagcaactgaagaagaaatcaatgctgaaatcgaacaattggcagcagattacaacatgccagttgaacaagttcgcaaccttctttcaccagaaatgttgaaacatgacatcacagtgaagaaagccgtgaacgtgatcacaagcacagcaaaagtaaaataattgagattaaaaaggctggacaacaactgttcagcctttgatgtttgatagaaataactgtatgacgcagtggttgattggcatctttgttcgcctttaagctccaaagatgacctaatcaactgtgcgggggtgggaaaacgaactctttttaactagtcggagttctttcccactcccttttctgatttcatggagaatcctggaattttcctttgacgaaaggggaaatttatcgtacaatagagtgtaacgataaaatgcgtgatagatttagtgacgagaagttttcaatctatcatcgaggataggatgaggtttaagaccggatccttctccatttaggaaatgaaacataaggagatttacccttggaattagaagtatttgctggacaagaaaaaagtgaactttctatgattgaagtggcgcgtgcgattttggaattacgcggacgtgaccatgaaatgtactttagcgatcttgtaaatgaaattcaaaattaccttgaaaaatcaaacagcgagatccgtgaagctcttccattgttctacacagaattgaatgtcgatggaagctttatcccacttggagataacaaatggggtcttcgttcatggtatgccatcgatgaagttgacgaggaaatcatcgctcttgaagaaacagacgaagatgaaactcctaagaaacggaagaaaaaacgtgtcaatgccttcatggatggagacgaagatgcgatcgactacaacgacgacgatccagaagacgaagaagtttacgaagcagatccagctctttcatatgatgaagaaaatccagatgatgaaaagagtgaagtcgaagcttacgatgctgaaatcaatgaaatcgtaccagatgatttgggtgaagaagttgaattgagcgaagaagacgacgaagaagaggactctgaagacgaggaagaagaataattcataagaagaggctgggacaaaagtcctagcctctcaattgtttttggattgtcgagcaagacgcagcgcagtggttgagtgggctctactacgctgatttcatcagcttttacagccctactcaactgtgcggaggtgggacgacgaaatcgaattctaacgaattaccgatttctgtcccactctctttttgtttgcattgaaaaaagtggcgaaatggcgtatgataaacgtgtaaggtttcccaataggaggtgttcagatggactttcgtttagatcaaagtttagtagctcttggtattgatacggttgtggtcggaattgctagaaatgtggatccccaagcagtcctgcccccttcttttcttgaaaagaagaaagcagttgaacaatgggcgctccagtgtcagacagaagaagtagcggcatcccctgtcatcaaaggctatacagacctcttgcaaaaagtagggcgtagcatcaagaaaaatccaccaacagttcttgctcttatccgaaacatccagcatcgtggtgctctgcctcagatcaatagcatcatcgatatctataatgtcgaatctctgaagtcttttctcgcgatcggaggacatgacctagataagattgagggaccgattgaatttacagtgagtcaaagagaagatctcttcttccccatcctttctagcgaaaagcatgtcgcaccgacagatcccgtctatcgggatcaaaaaggagttctggcttggttggatgtacgcgatagtgaccattataaatttgaggagactacgcaaaacgctctctttgtcattcaaggaaataccgagacatcagtcgagatgcgtttagaagcactggagcgaatccataaggaccttgcttcttgcatgcctcggcttcaatttgagaaatttctcgtcacacaaaatggagtggaaaaagtctcataaacagtgaaaaccattttcatgaaattttcaatttgacaaagtagaccatttgcggtaagatattgttcgggcacctcattttgaggtcggagctccctagcgattagggggctatttttgttttttctgcaaagaggaatggcctctacaacattagaagaagaggaaagcacatgtcaacaaaatatatttttgtcacgggtggtgtcgtatcatccatcgggaaagggattgtcgcagcaagtcttggtcgcttgcttaaaaatcgtggattgaaagtaactatccaaaaatttgacccttatatcaatatcgaccccgggacgatgagtccttaccaacacggggaagtatttgtcacagacgatggtgcagagacagacttggaccttggtcactatgaacgctttattgatatcaatctgaataagtactcaaatgtgacgacagggaaaatttatagtgaggtccttcgtaaggaacgtcgcggagaatacttgggcgcgactgtacaggttattcctcatattacagatgccttgaaagaaaagatcaaacgagcagcgacgacgacggattcagatgtcatcatcacagaagtcggaggaacagttggagatattgagtcccttccattccttgaagctcttcgtcaaatgaaggcagatgtcggtgctgaaaatgttatgtatatccacaccacccttcttccttacttgaaagctgcgggagaaatgaaaaccaagccgacgcaacactctgtgaaagaattgcgtggtcttggaattcaaccaaatatgttggtcatccgtacagaaaaaccagctggtcaaggaattaagaacaagttggctcaattctgtgatgtggcaccagaagctgtcatcgagtcacttgatgtggaacatttgtaccaaatcccattgaacttgcaagcacaaaatatggaccaaatcgtttgtgaccatttgaaattggatgttcctgcagcagatatgacagaatggtctgcaatggtcgacaaggtcatgaacctcaagaagcaggtcaagatttccttggttggaaaatacgtagaattgcaagatgcctacatttctgtcgttgaggccttgaagcactcagggtatgccaacgatgcagaagtcaagattaattgggtcaatgccaatgatgtgacagctgaaaatgtggcagaactccttggagatgcggatgggatcattgtcccaggtggttttggtcaacggggaacagaaggaaaaattcaagccatcaagtatgcgcgtgaacaggacgtcccaatgttgggtgtctgcttggggatgcagttgacttgtatcgagtttgcccgtcacgttttaggcttggaaggggctaattcatccgaattggatccagaaaccaagtatccgattatcgatatcatgcgggaccaaatcgatgtggaagacatgggaggaacgctccgtctcggtctttacccatctaaactcaaacgaggctcaaaagcagcagctgcctatgacaatcaagaagtggtacaacgtcgccaccgtcaccgttatgagtttaacaatgctttccgtgaacagttcgaagaagcaggatttgtcttctcaggcgtttcaccagacaaccgtttggtcgaaatcgttgaaatcccagaaaacaaattctttgttgcttgccaataccacccagaattgtcaagccgtccaaaccgcccagaaggactttacacagcctttatcacagcggcagttgaaaaccacgatagcaaataaaaatcaagggagcaggtcgaaggacctgctccctttttgtgaaaaaatgacaaactctgaaaaaagtttgaaaaaaatcttgacaaaaaagtcgttgattgatatactagtaaagtactcaatcgcggggatggcggaattggcagacgcgcaggactaaggatcctgtgaccgctttaggtcgtgagggttcaagtccctctctccgcatcggatcaagatagcttcggctatcttttttttgttttcaaatttctttgtggtagaataggtgtgagatgaggtgagaacatgaagaaaaagtatctggttttggtcgatggcctctttgcactattgggaagtgccattaattttttcggtcctatcctgattttagcgatggcgataggcgcatacaaggatacttttagatattttattgccttaaacatatggaatgttttcatttttctaattgcgatggcgtctcagtatctgctcagagatgaaaaaagaatcaaaaaatggattcttcatctctttctgatagcgggctttattctctttcttgcgtcaatccctgctgtgggtgagaatattcccgttcttgagggagtgctaaacggacttcttggaaaaatatttaccgacagtcagttatttgctgcttatttctattctcaatgggttgcagcggtatcctttgtgatttgcgggattgcttttctcctttcgttaaaaaattttaaagagaaagattgaaaggggttaagctccttttttgctttttgaataggatggaagtcttaggagggagagggttcctcctcatttatcgtaagaaatcgcttaaagccacaggaaaaactagcaatttcatctaaaaagtgataaaataaacaatgtaagtgggattaaccccacaaaaatttataggaggcctataacaaatggcaatcgtttcagcagaaaaatttgtccaagcagctcgtgacaatggttatgcagttggtggatttaacacaaacaaccttgagtggactcaagctatcttgcgtgcagcagaagctaagaaagctccagtacttatccaaacttctatgggtgctgctaaatacatgggtggttacaaagtatgtaaagcccttattgaaaaccttgtagaatcaatgggtattactgtaccagttgctattcaccttgaccatggtcactacgacgatgctcttgaatgtatcgaagctggttacacttcaatcatgtttgacggttcacaccttccagttgaagaaaaccttaaattggcgaaagatgtcgttgaaaaagctcatgctaaaggtatctcagtagaagctgaagttggtactatcggtggtgaagaagacggtatcatcggtgacggtgaattggcaccaatcgaagacgctaaagcaatggttgctacaggaatcgacttcttggctgcaggtatcggtaacatccacggtccttacccagcaaactggaaaggtcttcaccttgaccacttgcaaaaattgactgaagctgttccaggattcccaatcgtattgcacggtggatcaggtatccctgatgatcaaatccaagcagctatcaaacttggtgttgcaaaagttaacgtgaacactgaatgccaaatcgcatttgcaaatgctactcgtcaattcgtacgtgaatacgatgcaaacgaagcagaatacgataagaagaaactcttcgacccacgtaaattcttgaaaccaggtttcgaagcaattacagcagctgttgaagaacgtatcgacgtattcggttcagaaggcaaagcttaattgaaaacaggaaagcaaggtcccatgtggatcttgtttttttgtatgggaaaagttgcttccgggatttaatttttgtacaatatgcctatgaaaaaatttaaacagttttgctggatcatttttgtttttcttatcctttttctaggaggcacatttggttttcaccaacttagtttgcaaaaagaaagtaagcttctgactcctatcggtaaagaggtgacggtcaatggacatcgaatgaatgtctctgttaaaggagaaggatctgaaacaatcgtttttctttccggtgcaggtatcgcctctcctattttagactttaagaatctatcagattccctatccaaaaaatacaaagttgttgtcgtggagcgagcaggatatggttttagtgaagatagtgatcgttcaagagatgtgatggaggtcctttctgagacccgtcaagctttggcgcaagctcatgtttcaggtccttatgtgattatttcgcattctatggctagtttagagagtcttgcttggcaagagaaatatccaaatgaagtgaaggctttgattggtctggattgggccttgccagcgagttatgaagatttaaaagaacacccaactctcataaccttagcctattggacgagtaagattggcctgctccgttatttcccagagtctgtttacctgaagaattctgacttgactaaaagtgagcgtcagcaataccgatttttagcttacaagcagttgctgtcgacggctatgctcaatgagacccgaactgtaaagaaaaatgcccaaaaggttagtaaatttaccattgatcccaaaatccctgtacttctcttggtttcaaatggggagggaaccagctttagccaatcagagtggcaacgttatgcagagagatttgcaagcgaccagtctaatgttcaagtcgactatatggatgcgcctcacgacctctatcattatcaaagcgatgctattgtttctcgtattaaagaatttttagagaataattgagggcttaaaaatccattgagactgatgataataattaaatgctgaaggattaacagtagaatcgttaattttctcgattaaaaaaatcctttttcttaacaataagcctgcccctaagggcaggttttttggtgtcttaaggaaactatttaacagaatttttgattaaaagtttcattttaagagagaaatctctaatttcataatctataagcaaacgcttgcattcctttttttattagattataataggttggtataaagccttctgtaataatattgagtaagtgtagaaagtaaggatttagaatatttgtagtcaaaaatacaatgttgcttcttacgatagggagatagatatggcaatgatagaagtgcaacatcttcggaaaaattttgtgaagacagttaaggagccggggttaaagggagccttgcgctcctttattcatcctgaaaagcagacctttgaagcggtcaaggatttaacttttgaagttccaaaagggcagattttaggatttatcggggcaaatggtgctgggaagtcaaccaccatcaaaatgctgacaggaattttgaagcccacatctggcttttgtcggattaacggcaagattccgcaggataatcgccaagattatgtcaaggatattggagtcgttttcggacaacgcacccagttatggtgggatttggctctgcaagagacctacacggttttgaaagagatctatgatgtaccggactcgcttttccataagcgcatggactttttgaatgaagttttggatttgaaggaatttatcaaggatcctgtgcggactctttcactaggtcaacggatgcgggcggatattgcggcttccttgcttcacaatcccaaagttctctttttagatgaaccgactattggtttggatgtgtcggtcaaggacaacattcgtcgggccattacccagattaatcaggaggaagagacaactattctcttgactactcatgatttgagtgatattgagcaactctgtgatcggatttttatgattgataaggggcaagagatttttgatggaacggttagccagctcaaggagacatttggaaagatgaagactctctcctttgacctgacgccaggtcaaaatcatctagtctctcattatgagggtttgcctgatatgtccattgatagacaaggaaatactctcaatattgaattcgatagttcccgctaccagtcggccgatattatcaagcaaaccttatctgattttgaggtccgtgatttgaagatggtagatacggatattgaagatattatccgtcgcttctatcgaaaggagctctaagatggtcaaattgtggagacgttataaaccctttatcaatgcagggattcaggagttgattagctatcgagtcaactttattctttatcggattggcgatgtcatgggtgcttttgtggctttttatctatggaaggctgtctttgattcctcccaggagcctttgattcagggcttcagtatggcggatatcaccctctacatcatcatgagttttgtgactaatcttctgactaggtcggattcttcctttatgattggtgatgaggtcaaggatggttccattatcatgcgcttgttgcgaccagtgcattttgcggcttcttacctctttacggagcttggttccaagtggttgatttttatctctgttggactgccatttttaagtgtcattgttttgatgaaaatcttatctgggcaagggattgtagaagtgctgggactaactaccctttatctttttagcttaacgctggcctatctgattaactttttctttaatatctgctttggattttcagcctttgtatttaaaaatctttggggttccaacctacttaagacttccatagtggcctttatgtctgggagtttgattcccttggctttctttccaaaggtcatttcagatattctgtccttcttacctttctcatccttaatttacactccggtcatgattattgttgggaaatacgatgctagtcagattcttcaagcacttttgcttcagcttttctggcttatagtgatggtgggcttgtctcagttgatttggaaacgagtccagtcatttatcaccattcagggaggttagtatgaaaaaatatcaacgcatgcatctgatttttatcagacagtacatcaagcaaatcatggaatacaaggtagattttgtggttggtgtgttgggagtctttctgactcaaggcctgaacctcttgtttctcaatgtcatctttcaacacattccctccctagaaggttggacttttcaagaaattgcctttatctatggattttccttaattccaaagggactagatcatctcttttttgacaatctatgggctttaggtcaacgactagttcgaaaaggggagtttgacaagtatctgactcgtcctatcaatcctctctttcacatactcgttgagacctttcagattgatgccttgggtgaacttttggtcggtggaattttactagcgacaacggcgactagcattgcttggactcttccaaaattcctgatttttctagtttgtattccttttgcgaccttgatttatacttccttgaaaattgcaacagccagcatcgctttttggaccaagcagtcaggtgccatgatttacattttctatatgtttaatgattttgccaagtatcctatttctatttacaattcgctccttcgttggttaattagctttattgtacctttcgcctttacggcctactatcctgccagctatttcttgcaggacaaggatggactctttaatattggtggtttgattctgatttcccttgttttctttgttatttccctcaaactttgggacaggggattggatgcctacgaaagtgctggttcgtaagaggtaaagtaagactaaaatcaggaaaggaacttatgatgtttgtaattaaagaagtcaagggtgaagatcaaaaaatggcagttgtcgctgagattttaagggatttgccagaatggtttggaataccagaaagcacgcaagcctacattgaaggagctaaggatttacgagtttgggctgcttatcaagaaagtgatgtagtagggtttataagtttatcatattcgagtgaagattgtgctgaaattgactgtctaggcgtgaaaaaatcattccaaggtcaaggaattggaagggaattaattacgactatagaaagagaagcagtcaaacaagtggactacctacaggtcaaaacagtcgcagaaggttcaaataaagattatgaccgaacaaatgtcttttatcgcagtcttggttttaaaaaattagagatttttccgcaactatgggatccacagaatccatgtcagattctgattaaaaagatcaactaaaagtgcttgacatccgctatcagagtgctatactaagaaggtaatcgccgatttagctcagttggtagagcaacgcactcgtaacgcgtaggtcacaggttcgatccctgcaatcggcatagaaaaaatctgctttgaaggagcgagacgatgaataatggtgatcacatattcgttcggtctcgctccttcttttgaccacataggcgccatttttgaccacttagtcaaaagtccttgtctccgtaggagctctctgctatcatagaatcatcaaaggaagaaatacttccgaataatcaaaatgaggtatatgatgatgaaaaaactacttggacttggatttattttggttgctcttgcggttgtcacaatgggaatggttggttttccaaagctcgatgtgaacatctggcccctatttcctgttctcttatttgcattctttacacttgaaaatctcttgaaaaaagattacaaggcaagtgttatctgcgccttgatcgcatttatgatcgcaaatgcgatttacgatgtcctgccggtttcaaatggtctggtcatcacagcaggtgtgctcgcttgcgtaggtcttagttttcttttaccggacaaggaaagcaataaataaagaaaggaggctgggataaaagtcctagtctctcaattgtctttggattgtagagcaagacgcagtggttgagtgggctctactacgctgaattcatcagcttttacagccctactcaactgtgcggaggtgggacgacgaaatcgaattctaacgaattaccgatttctgtcccactctcttttttacttctcaaatacgacctcttgatggggaaaacgtgccacttactgaaaagcccttgttttgttttcaacagctgttataatggtactatcaaaacgttgggaaaggagttttatgaaagttagaatcgaattggatccatctatggacgagcctgagatcttgattcgagctccgcgcttgaccccggagttgacccagctgcaagagagaatcctcgaacaaaaggttgctcctttggccttttacaaggatcgaagtgagtattttctggatgtggcatcgatcctcttttttgagacggacggggagaagatttttgggcacaccaaggacgaggcctatgaggtcaagcagaagctctacgagttggaggagctgcttcccatcgccttttgtcggatatccaaatccaccattgtcaacgcaaagcagatctattctctagaaaagtctttttcagggaccagcacggtcaatttctaccagacccataagcaggttcacgtatctagacgctactatcaactcttaaaagaacgactaaatgaaatgaggtaatatcatgagaaaaaaattaattggggtattcttaatccttttagcagccttaatccttttacagggctattttgtaaaatgggacatcagcatctggactctagcatgggtgatcttgcttgcagtcctatccctctctagtttcttaaaacgccattttggttggggattcatctatggacttttagccctcttttgtctcaatgggcaataccatttcctcccagtttcaaattcagttgtcatcctttcctcaattctcgctgtgattgggctcaacattttgtttaaaccctctaagaaaacaaaagtccgcctagcttcctattctgctgggtccatgagtaagtcggacggcaatgacatcgatgtcactttttcaacagtgacaaaatatctcaatgaccaacactttacccacggaagtgcagatgtgagtatgggagaagcttcggtttattttgacaattgccgcatcgagggtccatctgctcagtttgttgtcgatgtttcccttggaagtttgagtctctatgtaccaagtgattggcgtgtccatgtaaatgtggataattccctctcagcgatccaacatcaggaaaatccaagtgctctgacaagcaaggatttctacattacgggtgatgtttccttaggaaatctggaaattatctatgtcggagcgaattcgttttcttaagtctgaaatgaaaaactttggccaaaagcttgccaagagagattttttttggtaatatagtacggtatgtggtgctagcacatccgttatattagatctaataggaggaaacacagaaatggctaaagtatgttatttcacaggtcgtaagactgtatcaggtaacaaccgttcacacgctatgaaccaaacaaaacgtgccgtaaaaccaaaccttcaaaaagtaactgtccttatcgatggtaaacctaaaaaagtttgggcttcagctcgtgcattgaaatctggtaaagtagaacgcgtttaataaagaaagaaggctgggcataaagtgtccagccttcgcttttgataggaatagtagcatgacgcagtggttgattggaactactcatgtttgaaacattcgtacttcctaatcaactgtgcgggggtggaaaaattgaaaaggtttggggaaccttttcaactttttttattttacggagttctttcccactcccttttctttttctctagagacagctgtcacagcgggagaagaatagtccctacccttttacagctgatctcttttatggtaaaatagaatataaaatacttttgaggtagaaattatgacagtaaaaatcaatacaaaggacggtcaaattgaattgactgatgaggttatcgcaactgttgtaggcggtgccgctactgagatcttcggtgtggttggaatggccagcaaaaatgcgatcaaagataatttccaagccctcctagggaaagaaaacttctctaaaggtgttgttgtcaaaacaacggaagcaggaactatcgcagttgatgtttacactgttttgagctatggaacaaagattagcgaagtctcaaaaaatattcaagaacgtgtgaaatttagtttggaaaatcaacttggaatcactacggatactgtgaatgtctatattcaaaatatcaagattgtgggagaataatcgtggctaatattactacaagtttatttcaagaaatggttcaagcgggggctacgcgcttaaataaacaagcggaatatgtaaactctttgaacgtctttcctgtaccagatggagatacagggactaatatgggaatgaccatcgaaaatggggccaaagaagtatctgaccgttctgcatcaactgttggagaagcggcagggatcttcgctaaaggtctcttgatgggtgcgcgtgggaactcaggagtcatcacttctcaattgttccgtggattttctcaaagtgtcaaagacaaagaagaattggatggagcagcgcttgcagcagccttccagtctggtgtagaagttgcttataaagccgttatgaagccagttgaaggaaccattttgacggtttctcgtggggcagccatcggtgccaagaaaaaagcagaatctaccaacgatgcagtagaagtcatgcgtgcagctcttgaaggtgctaaaacagctcttgctaagactccagatatgttgccggtcttgaaagaagttggcgtggtagactctggtggtcaagggttggtcttcatctatgaaggattcttgtcagccttgacaggtgaattcatcgcttctgaagagttccaagcaacacctgcaaccatgtcagaaatgatcaatgcagaacaccacaagtcagtcgctggccatgtcgcaactgaagacatcaagtttggttactgtacagaaatcatggtcgctttgaaacaaggtccaacctatgtcaaagatttcgattacgatgaattccgtaactatttgaacaaccttggggattccctattggtggtgaatgacgatgagattgtcaaagttcacgtccatacagaagatccaggtcttgtcatgcaagaaggtcttaagtacggaagcttggtcaaggtcaaagtcgacaacatgcgtaaccaacacgaagcgcaagttgaaaaagaagagcgtcaagcgaagccagttgaagaaaaagaatatgccatcatcgcagtagttgctggtgagggattggctgatatctttaaagcgcaaggagttgattacatcatctctggtggtcaaaccatgaacccatcaactgaagactttgtcaaagcggttgaagagttgaatgcacgcaacattattatcttgccaaacaacaaaaatatcttgatggctgctcaatctgcagcagaagtgattgatcaaccagcagcagttgttgagaccaagaccatccctcaaggattgactagtcttcttgcttttgatgaaagcaaatcaatcgaagaaaactacgaacgcatgagcgcttcattgggcgatgttgtgtctggtagtgtgacgacagcagttcgcgataccactattgatgggcttgaaatccatgaaaatgataatcttggaatggtcgatggcaaaatcgttgtttcaaatccagatatgatggaaaccttggaagaaacattcgctcatatgttggacgaagacagtgaaattgtgaccatctatgtcggtgaagacggcagtgaagagttggcaaatgaattggcccaagctcttgctgagaagtatgaggatgtagaagtggaaatccaccaaggtggccaaccagtctacccatacttgtttagtgtagaataattgaacagaaggttcctttcggaacctttttttgtatatagataaacgaggagattcctatgaaatcggcgtgattcagagggattgagactgaagtgaaccgtccactgaggctttattcgtgagaaaaaggagtttctgcaaaaagtctcatattcatcagatttttattcaaatggaagagcttgaaaagaggaggaaatggtttgagaagtggagtttttagacaagaaagacgcgatatgttatactggtatcagtatgtgaaaggagagttataaaaatgaagaaattttttgtaacccttgggctagccattttggtattgactggttgttcgcaatcccaaacaaagaaaactacaaccgctagctcatctagcagttcctctgttaaaaaagaagtaaaaaatgaagaaaaaaccacaaccttagtaggagatatcaatggaacaaaacaccgggatatcatcaagtctaagggagataaggttgaaaaccttcgtatcgaagtgacagctgatctgccccaacaacttagaactatcgcagcagagaagtcacctgaagaacttacagcagccattcaagctttgctggagcaaaatgaagactataagaagctaaaaaccgttcccggttttagtttggaatacacagtcacaccagagaaaaaattgctctcaacaagtgtgattgacatcaacctaattgacgccaagtctctagaagaaatttcttacttcaaagatgctggtctcaatgatttgaaaaacatgaaggcagatgccttggtcaaggccttgaaactgcatggcatgaaagaagaaggtcagtaagaagaatagaaaaagtcgagtgaagtcacttggctttttttagtgacttttgtcatgtgagcgagtgacaaaattatctagtggctgttattttctttcgctataatatagtcagaaagtaagaggtaaggaaaaatgaaacaatggttttataaagtgtttacgttaacagtggtggggatggtcatctatttgatcttttcaaaggatgatagtctctattaccattttccttgggaattatttgctgggattggcatcatgagctgggcggtccaggaggttttgaaaatggtcaaggcggttaaaaaggaaatggagcaatgaaaacaacgggagtaaccctggttgtttttgccatcattccggccgtttaagcctggttgaaaggagagtatcatgagcgtcattagagtagagaacttgaaaaaaagtatcaaaggaaaagtcattttagaagatctttcttttgcagttgaacggggggattgtctggccttgatcgggccaaacggagctgggaaaacaaccttgatgaactgtctgctgggagatatgaaggcgacttctggaactattgaagtagagggaaaagctcctggtcatcctcaattaaaggctagtgtgtcctatctccctcaagagaatgccatcgttcaaaagttaaccgtgcaggaactgatcaacttctttcgctctatttatccccaatccttaacagggaaagaaatagatgatttattacgttttagctcagaacaaaagaaacaattggctagtaagttgtctggtggtcaaaagcgcctcttatcctttgttctaaccttgattggtcgtcctagtcttctgtttctggatgagccaacagctggaatggatacgtccactcgccaacgcttttgggagatcgtcggacatttaaaggaccaaggtgtgactattgtctattcttcccattacatcgaggaagtagagcatacagctgatcggattttggtcttgcatcagggacatttgcttcgggatacgacgcctctcgctatgagaagcgaagaggtagaaaaacatttcaccttgcctttgcgctaccaagctctagcagcagagatggaaggtgttagtgaagtaatcattaaacccgatgctcttcagattgtgacacgtgatgccaatcgtttgtggcttcgattacaagaagaaggctgttcgatccaagaaatcgaagtgaccaatcgaagtttattggattctatttttgaaaatacaaaggaagtaggtaaagaagatgaaacgcatgaaagctctcggcgtggttgagtggcatttgactagacgccaagccatttattacttgttatcaattgggatgcccacggccttttatctcttcttttcagggatgtaccaggacacaccaggggcacccgctcactttatgagggattatctcctttctatgacggcattttctatgatgtctacggctatcttttcttttccaaccgttcttgaaaccgatcgactcaataattggcaaaaagtcttgcgccatacccccgtatctatggtagaatattatctaataaaggttgtgggtctctttgtcgattttctcctatcgattgtagttgtctttaccgtgggccatgtggtgcggcatgtgaatatgcccctacaggattgggtcttagcagcctttattctcatcctaggaagtctagcttttgtggctctcggtctggttttgaccctgcttccttccagtcaattgatgtctgttgtgggcaatctcctttacatggggctggctgtcatgggtggtctttggatgcccattagcctctttccagaatggatgcaagccatcggcaaatgcttaccaacctatcaattgatggaactgatcaagacctttttaaacaaggggcaggtcaatgtctttgcgagtgtctatttaactttgtttaccctggtcttgtttgcccttgttatcgtctatcgtcgtcattctgaggttcgttcatgattgaaaaactcaaacatattcaccatatgttttacgtaggcctaatctttatggtctttccctttgcttctattttcttagggcagattccctggtggcatttctttttagccatcttctttatgatgagctatctaggaatcctcattgttgaaaataggacactgacctggattttttggatttatctattggcttacataggtggaaataccttatatgttgggacaggcttttgttggttttactattatctaagcaatattttagtttatcgttttagagtccacaattttcgttctccctttctttggacggcctttttatcacaactgatccttttgggagccttgttatttaatagagatatgggagaaaatgattggctttttgtactgatcatctgcttgttcatcgcgattatgacctatagtatggtccgggctgagatgatggaagagttgaaagctgaccatgccaagcaaaatgcccagatcaatctcttgctggcagaaaacgagcgccatcggattggccgtgatctacatgacagtctgggccacacctttgccatgctgagtgtcaaggcagacctggctgatcaattcttagcattgggtcaggttgagaaggcgcaggagcaggtgcaagagattcaagctatcagtcaggagtccatgcaccaagtccgagagattgtggagaatttgaagcaacgaaccctggcaagagagctagaaaccgtccagcaaatgctcgaagtggcgcaagtcaaagtggagatccaaaacgatctcgatacagccagcatctcgccgatcctagagtctgctctggccatggtgtctctggaattagctaccaatatgatcaaacatgccaaagcaacgcaagctcttctatcttatcgctccaccaagacaggtgtggaaatggtcgtagaagatgatgggattggctttgacaaagtctctgacaaggacttgcactcgattcgcgaacggattgccttgttgggaggagagctggagatcagtcatcaacacaagccgacccggatagaaatacggatcccctatcaagaaaggaaataagatgcgcttattagttgcagaagaccaaagtatgttgcgagatgctctctgtcagctcttacttttgcaagaggatgtagaaaatgtcttgcaggctggcgatggacaagaagctatccgtttactcgaaacccatccggttgatattgctatcttagatattgagatgcccatcaaaacaggactggaagtgttggaatgggccaaacgtcaacaacctcaactaaaggttgtcatcgttaccacctttaaacgaccaggctattttgaacgggccctcaaggccggagtagatgcctatgtcttaaaagaacgtcgcattacagatttgatggcgactcttcatgcagttttagcagggcaaaaagaatattcaccagaattaatggaaggaatcttgacccatcccaatcctctaagccctcaggagcaagcagtcctaaaagaagtcgctaaaggggcttctaaccaagaaattgccgatcgcttatttctttcgaacggaaccatccgcaattatatgtcaaccattctgaccaaattggatgcggaaaaccggactgaggcagcaaaaattgcccaagaaaagggttggttataaggaagaaaagagagtgggacagaaatcggtaattcgttagaattcgatttcgtcgtcccacctccgcacagttgagtagggctgtaaaagctgatgaaatcagcgtagtagagcccactcaaccactgcgtcttgctcgacaatccaaaaacaaaaaagaggctaggacttttgtcccagcctcttttttctgatagacctagcatttttagagaaactctcattattcggatttggatagaaaattcagaaaatttactatttttccttgaaatatttcctaaaaatggtatgatagtagcatgctcatttgagaaacaaagtactggaaaggagagacatggagaaaattaccttagaaactgcgaaaaccggttcagaacttgtccttgaaaccctgcgtgatttgggaatcgatacgatttttggttatcctggtggagccgttttgcctttatacgatgctatctatagctttgaaggtatcaagcatattcttggacgacacgaacaaggatgcttgcatgaagctgaaggctatgccaaatcaactgggaagttgggtgtcgcagtcgtcacgagtggaccgggggctaccaatgctattacagggattgcggatgccatgagcgacagtgtgcctttattggtctttactggacaagttaatcgcgctggaatcgggaaagacgccttccaagaagcggatattgtgggaattaccatgcccattaccaagtacaattatcaagtacgtgagacggcagaccttccgcggattattacagaagctgtccatatcgcgactacaggtcgcccaggtcctgtcgtcattgacctaccgaaagacgtctctgctatagagacagatttcatctatgaaccaagtgtgaagcttccaagctatcagccaaccattgaaccaaatgaattgcaaatcaaaaagattttgaagcaattgagtaaggctaaaaaaccagttcttcttgctggtggtggtgtgagttacgctggagctgcaaaagagttgcttgattttgcagagcgctatcagattccagtagtgaccagtcttttaggtcaaggaacgattgcgaccagtcatcctcttttcctaggaatgggaggaatgcacggatccttcgctgctaacattgccatgacagagacggatttcatgattagtgttggttgtcgatttgatgaccgtctgacagggaatccaaaaactttcgctaagaatgctaaggttgcccacatcgatattgatcctgcagagattggcaaaatcattgctgttgacattccagttgtcggcgatgcgaagaaggccttgcagcagttactagcagagccaacggttcataacaatacagaaaaatggatcgaaaaggtaacccaagataagaatcgggttcgttcttacgacaagaaggaacgggttgtacagccacaagctgtgatcgaacgtattggagagttgaccaagggggacgctattgtcgtcacagacgttggacaacaccaaatgtgggcagctcaatactatccttaccaaaatgagcgccaattggtgacttcaggaggcctaggaaccatgggattcggtgttcctgcagctatcggagcaaaaattgccaatcccgataaagaagttgttctctttgtcggagatggtggtttccaaatgaccaaccaggaattggcgatcttaaatatttataaggttcccatcaaggtcgttatgctcaacaaccattcacttgggatggtccgtcaatggcaagaagccttctatgatggtcggacatcagagtcagtctttgatagccttccagatttccaattgatggcgcaagcctacgggatcaagaattataaatttgataatcctgaaaccctagagaaggatttggaagtcatcacagaagatgtaccaatgttcatcgaagtagacatttctcggaaagagcatgtcttaccgatggtaccagctggtaagagtaatcatgagatgttgggggtgaagtttaatgcgtagaatgttaacagccaaacttcaaaaccgctcaggtgttctgaaccgctttacaggagttctatcgagacgtcaagtcaatatcgaaagtatctctgttggcgcaacagaaaaccctaacgtatcgcggattaccatcatcattgatgttgcttcgcacgatgaagtggagcaaatcatcaaacagctcaaccgccaggtggatgtgatccgtgtccgggatatcacggataaaccacacttggagcgcgaagtgatcttggtgaaagtttctgcaccagctgagaaacgggcagaaatcttggccattattcaacctttccgtgcaaccgtggtcgacgtagctccaagctcgattactgttcaaatgacgggaaatgcagaaaagagtgaagcccttattcgggttattcgtccgtatgggattaaaaacatcgcccgcaccggtgcaaccggatttactcgagattaattctcgactgaaaattgttatcctcgccttaaaaaggcaaattaaaatagaaaagagattttacttatggcagttcaaatggaatatgaaaaagacgtaaaagtagcagcacttgacggtaaaaaaatcgccgttatcggttacggttcacaaggtcatgcgcatgcacaaaacttgcgtgatacaggtcacgatgtgatcatcggtgtgcgcccagggaagtcattcgataaagctaaagaagatggttttgatacttacacagtagcagaagcaactaaattggctgatgttatcatgatcttggctccagacgaaatccaacaagaactttacgaagcagaaattgctccaaaccttgaagctggtaatgcggttggtttcgcacacggatttaacatccacttcgaattcatcaaagttcctaaagatgttgatgttttcatgtgtgctcctaaaggaccaggtcacttggtacgtcgtacatttgaagaaggttttggtgttcctgcactttacgcagtataccaagatgctactggtaatgcgaaagatatcgctatggactggtgtaaaggtgttggtgcggcacgcgttggtcttcttgaaacaacctacaaagaagaaacggaagaagatttgttcggagaacaagctgtactttgtggtggtttgactgcccttatcgaagctggttttgaagtgttgactgaagctgggtatgctccagaattggcctactttgaagttcttcacgaaatgaaattgattgtggacttgatctacgaaggtggcttcaagaaaatgcgtcaatcaatctcgaacactgctgaatacggtgactatgtatcaggcccacgtgtcatcactgagcaagtgaaagaaaatatgaaatctgttcttgctgacattcaaaatggtaacttcgctaacgactttgttaacgactacaaagctggacgtccaaaattaactgcttaccgtgaacaagctgctaaccttgaaattgaaaaagttggtgctgaattacgtaaagcaatgccgttcgttggtcaaaacgacgatgacgccttcaaaatctacaactaattgtctgtagaagactaagcaagttgggacaccctggcttgcttttttcatcaaaacacagcaacagaggtatgaaatgataacagcaaaagatgtggctaaggcccataaaatattaagaggggtcgttgttaatacgcctcttgaatacgaccactatttatctgaaaaatatggggcaaagatttatttgaaaaaagaaaatgcccaacgtgttcgttctttcaaaattcgtggtgcttactttgcgatctctcaattatcaaaagaagagcgggaacgtggggtagtgtgtgcttctgcgggaaaccatgcgcaaggggttgcttatacttgtaatgaaatgaagattccagcgaccatcttcatgccgattacgacaccgcaacaaaagatcggccaagtccgattctttggtggggattatgtaacgatcaagttggttggggatacctttgacgcgtcagctaaggcggcccaagaatttactcttgcagaaaaacggacctttattgacccgtttgatgatccaaacgtacaggctggtcaaggaacagtggcctacgaaatccttgaggaagcccgaaaagaatcgattgcttttgatgcagtcctcgttcctgttggtggaggaggcctcatttcaggtgtctcaacctatatcaaagaaacagagcctaggattgaggttattggggtagaggccgaaggggcgcgctccatgaaggctgcttttgaagcaggggggccagtcaaattaccagaaattgataaatttgcagatgggattgccgtgcaaaaggtgggccaattgacttatgaagtaacccgccagcatgtggaaactcttgttggagtcgatgaaggtttgatttcagagactttgattgatctttattctaagcaagggatcgtagccgaaccagcaggagcagctagtgtggcctcccttgaaatcttgcgcgaatacatcaagggtaaaacgatctgttgtattatctcaggtgggaataatgatattaaccgcatgcctgaaatggaagaacgtgccttgatctacgatggagtgaaacactactttatcgtaaacttcccacaacgtccaggggcccttcgcgagtttgtaaatgatatcttagggccaaatgatgatatcacacgttttgaatatatcaagcgcgctagtaagggaacaggccctgtcttgattggggttactttagccaataaacatgactatgcaggcttggtcaaccgtatcgagcgttttgatccgtctttcattaacttgaacggcaatgaaacactctataatatgctcgtctgagtatcatacagaaacaatcgaccatttaagcaatatatttttaaggaatatattgcttttttatcaacacttgtgatatgatatgcgtaaattaaaaggaggaactttttatgcctggatttattatctttgttttattcttgctactggttgcaggattcattgtgattagctcactatatgtggtcaagcaacaatccgttgccatcattgagcgcttcggacgttatcaaaaaattagcgatagtggcattcatatgcgagcgccttttggtatcgataaaattgcagcacgagttcaattgcgcgtcttgcagagtgagatcgtggttgaaacaaaaactcaggacaacgtattcgttaccatgaatgtggcgacacaataccgagtgaacgaaagcaacgtaaaggatgcctactacaagttgatgcgtccagagtcacagattaaatcatacattgaagatgctttgcgttcttctgttcccaagttgaccttggatgaattatttgagaaaaaagatgaaatcgcccttgaagttcaaaaacaagtggcagaagaaatgtcaacttatggatatattattgtaaaaaccttgatcaccaaagttgagccagatgccgaagtgaaacaatccatgaacgagatcaatgcggcgcaaagaaaacgcgtggcagctcaggaattggcagaagcagacaagatcaagatcgttactgctgccgaagctgaggcggaaaaagaccgcttgcacggggtcggtattgccgagcaacggaaggctattgtcgatggattggcagactctattaaagagttaaaaggagccaatgtagacttgaccgaagagcaaatcatgtctattctgttaaccaatcagtacttagataccttgaataattttgcagataaagaagggaataatacgattttcctaccagcaaaccctgatggcgttgaaaacattcgtacacaaatattatcagccctgaaagcaaagtaaactttttatcattttttaaaaaaggttcgtattttcagcgattttagttgacaaaatgtgcaaaaaaatttatattagtattggaaataataatataggagaaagatcatggctaaatcgaactttgaaaaagtagaatcagttgttggatgggtacgtgataagaaaattacagggtatcgtatcagcaaagaaacaaatgcccgtgaaatgtctatcattgccttggctcaaggacgtgcaaaagtaaagaatatctcgtttgaaactgcacttggattgattgatttttatgacaaaaatcatcaaaaatttgaagattaatttgttgttccaattgaaaaccagagagtttgctctctggtttttttgatgcctcacaagcagaagtggtacaaaaaacagcttgcttccatactggtaagcaaactgtttcaagagattaatgtaagaagcgttgaaggaattccttggtccgctcttcttttggattgctaaagatttcttttggatctccttgctcagcgatgacacccttgtccatgaagatgacccggctagagacatcgcgggcaaattccatttcgtgggttacgacaatcatggtgagtccttctttagcgaggtcctgcatgattttcaagacttccccaaccatttctgggtctagggcagaagttggttcatcgaagagaatggcatcaggatccatagagagggcgcgtgcgatggcgacccgttgcttttgaccacctgaaagttgtttcggacgggcagcccaatattgagatcccataccgactttttcaaggttttcctttgcaactttctctgcagtttcacgatcgcgcttgaggacggtcgtttgtgcaacgatcgtattttccaagacgtttaaattttcgaagagattaaagctttggaaaaccatccctaatttctcgcggtagtgggtaagatcatactcaggatcaagaacattttgtccacgatagagaatctctccagcagtaggagtctctagaagattgatggagcgaaggaaggttgattttccactaccagagctcccgatgatggagatcacctctcctttttcaacggtgagcgaaatatctttcaaaacctcattttgaccataagatttttttaaatgttgaatttcaagaattttttctgacattatttcacctcattgacttgcatttgatttgcacctgtagtataagtatcagaatctaagcgacgttcgatgtagcgaagaattcgtgtgatggtaaaggtgagaacgaagtaaatcacagcgatgatcgtaaaggttgggaagtattggtagttttgagttgcgaccgtatttcctgtaaagtacagttcaactacagagataacatttaaaacagatgtatccttgatgttaataacaaattcattccctgttgctggcaagatattgcgaacaacctgtggaaggacgaccttgcgcatggtttgtccatgggtcattcctagagcagtcgctgcttcaaactgacctggatccactgctaagatcccaccacgaacaatctcactcatataagctccggtattgattgatacgataaagatggcggcccaggtacgatccaaggaaatgttgaaggcttgggcggaaccatagaaaatgaccatggattgaacgatcatcggagttccacggaagatttcaatgtagacattgaggaaccaaccaaaggcagtttgacatccagcaaggaatttatttttagccttcggagctgttcggaagacaccgattaacaaaccgatactcaacccagcgatagttccagtcatagagattaagagggtcattccagttccccgtaagaactgtgggccattatcctttaaaatcttcatcatttggctaaagaatgtctgcttatcatcactagcatcactggaagctggttgcttcttaatcatatcatccatgagtttgacttggtcttcagacgaaatcttagctagtgcggcattgacttggtcaagtctagtatcacccttcttcatcccgatagcgatggtcgcatcttcttctccaacttcaaatccttttttgaattggatcatcttaaattttgaattagcggactcagcggttagggcttctggtcgttcggaaacataagcatcgatgacgccggattcaagcgcttgacgcatttgagcaaagtctcccatggcggtttcttgttttgcccctttgagttgagaaatgagcgagtagaggtagaccccttgttgagaggtaacctttgcatctttaaagtcatctagactagtggcattcgcatagtttccgtctttgcggaccagcatgaccggctcgctggtatagtagctattagagaaggcgacttcttttttacgttcagcagtgggactcatcccggcgataatcatatcgattttaccagatgtgagtgctggaattaaaccgttccaagatgttttcacgatcaaaggttttttacctaaatctgctgcaacttttttggcgatttggacatcgtacccattagcatattggttggtaccatcaatcttcacggctccatttgaatcatcttcctgggtccagttaaagggagcgtaggccgcttccattccgattcgtaaatagtcatctgcatgagcaacctgtgtgatgcctaggcaaatgaaaagccctgttaagagcgcgaataatgtttttttcattttttctcctcttccttattttaactcttcctattgtacggtaaaataggttgcatttcaagcatgctcctctttttatttaaaaaatgctataataatacaaaggagcgtgatcaaatgaaaaagtatttgtatgtttttttcgcctttctggcctgcctttttgtcagtcagaacgtccatgcatctagcccctcttatgatgtattgtactatggtggaaccttgaccttagacaactgggacgacgccacctatgaggaggagttggtctattatttcaaagattcttacagagggcagtatgttagtctaggaacggcggggaatatgccacaaggctttgcgattgagatgccaccaaaggttgaggtggaaggccgtgatcttcaaagagaacccgagattacgaatttaggtgatggctaccgagtgaaaatttataacagtggtgtggcgacagatacagtcaaaattaaagtcacatggaaattaaaaaatcttctttattcacacaaggatatcttgcagttgaactggaaacccattactgatggtgatcagaaggtggatgaagttcaatttcgtgtcattcctaagttcgcaccagccaatgcccaatcggaactgtatatccatacagcctttatgggaccagatgtgactgtaaaaaaagaagatggaatctattctgctactttctataacttaggcaagggaaaagcggtggagttgtatggatactggttgaagtcagacttatctactttgtatgattctggtcgaaatacaggattgaccaaattggatgaatttcataagaaccaagccaaaattgaacaagaaaaatactggacacgcatgttttggaaatggatcttgccagccttaattattgcactctggcttctttctctcttgggtcgcaatcggttcaaaaaaatgatttggcctggtgttacctatccgaccgatactcgtctttatgagattccacaggacattgcacctctgattatgagttcggttgtttattcagctgaactaaatgaggcttcccctaccaataaagagaaggcgactcctccggtatttacatttgaaaaaatgcttcaagccactttgctggatttgatggatcgtggagtgattgtctacgagcaacaaggaaatgaagtcgttttgaccaggaagtctcatggacatgtggatgattttgaacgctcttttatgaatatggcttttggggatcaggtttcctgtaccgttaaagatctctttaagaattatgaatttagtgatgacctatataaacatgccaaaaaagcagatcaagatgctattcgttcgctaggaagtagggctcaggctcactttgatacggctgtcaaccaggtagccagagatgttcatcgcaaggtggaagatctccatttgccaagctactatcgccctttagaggcaaatgaagaagcgcaagctagacgaagcctcttctttggttgggctgcttggttcatcgcccttggagcagaaatctttgccatctttgttctggggtggttctctgttccttgtttaattgcaattttgacgctttggtttttgccagcacgcttcaatggcgtctttaaggcctgcctacgagatggggttgtcaatgttgcgggtgctgagcaacgctattactgggatagttttggtcggatgttaaaagagattgctcacctcaacgatgcagagttgcagtctcttgtcctatggaaccgattattggtctatgcggccttgtatggtgtagccgatcaggtcacaaaggtcatgaaacttcggaatattcagttagaaaatcaagccttaaacgccttcgtttacaccccattctatcatgatgtgacccactcaagtcatgccatgtctacttatggatcgacagcatcgacagctagtcatttcacggtttcttctggtagtggaggaggcttctctggcggaggaggcggaggaggctttggtgccttctaagcagtactaagaatggtcttagtctctctttcccttctagtttggaaggcctggtccagtccatagatttatgatataatagagcaaatgtaagtttaggagaaaaagatgtttctgatcgaattaatcaaggcgatcctttttggaattgtcgaggggattacagaatggctaccgatctcaagtacaggtcacttgattctactacaggattttgtgcagtttaaaaaccaagatccagcctttatggagatgttcaatgttgtaattcaattgggtgcgatcctagcggttgtggtaatttattttgataaattataccccttcaaacctggtaaatctccactagaagtacgtcggacctggcaattatgggcgaaagttgcagttgcaaccctcccgcttgtctttgtttttaaattggatgattggtttgaggcgcatttccacaattcgatttccgttgcgattatgttgatcacctacgggattgcctttatctatctggaaagacgggaacaggttgagccagcagtaacggaattgcataagctaccttatcgaacagctctttatatcggactcttccaagttttatcgctatttccaggaacaagccgttcaggtgctacgattgtaggtggcttgatcaatggtgttagccgcccagtggtgacagaatttaccttttatttggggatcccagccatgtttggcgctagcctcttaaaggttgggaaattcgctcttggcgggcattcactagcactggggcaactctttattctactggtagcgatgggagtggcctttgtggtcagcatgtacgccatccgcttcttgacagattatgtgaaaaatcatgatttcaccgtctttgggaaataccggatcgttcttggttccatcttgctattgtatggactcttccgtgttattttctaagagatcggttgaactcgatcaaattatttttcgaggttggagacttttgtcccgacctcttttcgatgcatcctttttttgaattctatccaattttttagtataatagtaagactagaagtatgaggttatgctatgaagatgaagcaaattagtgattcaacaattaagatcacaatccaactagaagacttagaagaacgtgggatggaaattgctgatttccttgtcccacaagaaaaaacagaagaatttttctacactattttggatgagctcgaaatgcctgaaagcttcctggatagcgggatgctgagtttccgtgtgacaccaaaaccagataaattggatgtttttgttaccaaatcaaaaattgaccaacaattggattttgaggatttgtcagatcttcctgatatggaagagttgtcgcgcatgacgccagatgaatttatcaaaaccttggaaaaaacaatctctgataagacaaaaggggatgcagaagccattcaccatttggaacaagaagagttgcgggacaatcaagaacaagattcgacatctgaagcaccagtaagtcagtatatttattacattttgcgtttttcaaatatccagcaagcagttgccttttcaaaaacggtaagctttccagtggatacctctgaattatacaaaatgggatccgattattatttaaccgtcttgatcgatacagaggatcaaccaaatcaatatccaacctggttacttgctatcattcgggagtatgcggatgattcagaagtgacacgggcagttctgcaggaacatggtcatttattaatggtgtctggtgcgattgagaatttgaagaaagttgctagcttatgatgtccttttccttgcaatttgttctggtgctgattggaacttttatgattgccttggtattgacgcccttggttcgcctattctcctttaagattgatgccgtagattatccgaatgcgcgtcggatcaataccaagcctatgccaagcgcgggtggactgtctatcgtgattgctttttcaattgcgactcttgtgtttattcctatgctgacatccaccaccgcaccaatcaaaagttacctatcctataccttgccggtcgtgggcgcaggatggattatcgcgctcacaggattgatcgatgatgtaaaagagttgtctgccaagaaaaagatgatcggcatcctgctggcagcgagtctggtctggtttttgacagattttcggctgaatgattttaagattccattcggtggtcccttacttcattttgaaccatggctatcgtatcttttgacggtgatttggattgtttctattaccaatgcggtcaatctgattgatggattagatggattggtgagtggggtctctattatttccctagtgacaatggggattgtgtcctatttctttcttccagtacccaatctctttctgaccatgacgatctttgtcttggttgcgtccatcgcaggtttctttccctttaactaccatccggccattctctatctgggagacactggtgccttgtttatcggattcatgatttctgtcttatccttgcaaggtttgaaaaatgcgacagctgttgcagtagttaccccaatgattatcctcggagtgccgattacagatacctttttagccattatccgtcggactctttctggtcaaaaattttataaaccggatcgcaatcacttgcaccaccgacttctttctctgggcttgacacatcggggaactgtacttgtgatctatggaatttcgatgatcttctccttgatttctctcttgctcaacatctcgagtcgcattgggggtgtcctacttgtgatcgggctcttgtttggagtagagctgttagcagaattgatcggggttctggggccacatcacagtcctttgttaaatcttctgcgctatatagggaattcttcctaccgggaggaagttcgtcaaaaacgaaaagaaaaaactaaataagaatagttctaatcaaaagaaaagccatttaggcttttttttgatatacttgaaaggtaaaaaaatactttgtgatgaaggaatcgatgctttgagaaccttctagacttcaaagtaaaaagaaagggaatgcaatgtcgacattagaaattaaagaccttcacgttgaaattgaaggcaaagaaattttaaaaggtgtaaacctgaccctaaaaactggtgagatcgcagccatcatgggaccaaacggaacagggaaatctactctgtcagctgccattatgggaaacccaaattatgaagtaaccaaaggggagattctctttgatggtgtcaacatcttggaattggaagtagacgaacgtgcacggatgggcttgttccttgctatgcaatacccttcagaaatcccagggattaccaatgcagaatttttacgtgcagccatgaatgctggtaaagaagaggacgagaagatctctattcgtgatttcatcaaaaaattggatgaaaagatggaactgctcaacatgaaagaagaaatggcagaacgctatttgaacgaaggcttctcaggtggtgagaaaaaacgcaatgaaatccttcaattgttgatgttggagccaacatttgcccttttggacgaaattgactctggtttggatatcgatgcacttaaggtcgtatctaaaggggttaatgcaatgcggggtgaaggttttggagcgatgatcatcacccactaccaacgtttgttgaactatattactcctgacgtcgttcatgtgatgatggaaggtcgtgtcgtgctttcaggtggaccagaattggctgcacgcttggaacgtgaaggatatgcccaactcgcagaagaactcggttacgactataaagaagaactataacctgatgacaagtgatctaatgttgtcataaaatcaaacagatagtatctttattaggagaaaaaaatgagtattgaaaatattaccctcttttcggaactgcatgctgagccaagctggctgcaagatttacgaaaaaaagcttttgacaagatcgatcagttggaattgccagccattgaacgtgtcaaattccaccgctggaatcttggagatgggacgatcacagaaagcgaggcttctgccaatgttcccgattttacagccctcgattcaaatttaaaattagtccaagttggaacccaaactgtatttgaacaggtgccacaagccttggcagaccaaggagttcttttcacagatttccattctgccctagaagaaattccgcaggtggtagaagactactttatgtcttcggttaaatacgacgatgataaactagcagcttaccacacggcttattttaatagtggggctgtcctttatattccagaaaatgtcgaaatttcagaacccatcgaaggtattttctaccaggatagtgatagtgatgtaccttttaataaacacattttgattattgcaggcaaaaacagcaagtttagctatttggaacgcctagaatcaaaaggtgaaggctcagcaacagcaactgcgaatgtgacggttgaggtgatcgcccgctcaggtgcccaagtgaaatttgcggcgattgaccgtctgggtgaaaatgtcacagcctacatcagtcgacgtgggaaactaggtcaggatgccagcattgattgggctatcggtgttatgaacgaaggtaacgtggttgcagactttgacagtgacttggttggaaacggaagtcatgcagatttgaaagtcgttgccttatcaagcggtcgtcaggttcaaggaattgacacccgcgtgaccaactttggttgcaactcgatcggaaatatcttgcaacacggggttattcttgaaaaaggaaccttgaccttcaatggaattggtcatattatcaagggggctaaaggagcagatgctcagcaagaaagccgtgtcttgatgttatcggatcaagcacgttcagatgccaacccaatcctcttgattgatgaaaatgacgtcacagcaggccatgctgcatcgatcggtcaagtggacccagaagatatgtattacctcatgagtcgtggtctggatcaacacacagcggaacgcttagtggtgcgtggtttcttgggatctgttattgttgaaatcccagttaaagaagtacgtgatgaaatgatcgccaccattgaagaaaagttatctcaacgctaaggagaaacaatgctagataaaaatacaattgctcaagattttcccattctcgatcaactagtccatgatgagcctttggtttatctagataatgcagcgacgacgcaaaaacctaaacgtgttcttgaagcagttaatcactattatttgcaagataacgccaatgtccatcgtggagtccatactttggctgaacgagcgacagcagcctatgaggcggcgcgtgagaaagtcagaaaatttatcaacgcttcatcaaccaaggaagtgctctttacaagagggacaacgactggactcaactgggtagcccgctatgcagaagaagtcctaaaggaaggggatgaagtcctgatttccatcatggaacatcactccaatatcattccttggcagcaagcctgcaagaagacaggagcaaaactggtctatgtctatctaaaagatggcttactggatatgcaggacttaaagagcaagcttagtgagaagacaaaatttgtctccatcacccatgcttcgaatgtcttaggggtggtcaatccgatcaaggaaattgctcgattagctcatgaagttggagcgatcatggtcgtagatggggctcaatcaacccctcatatggccattgatgtacaagacttagatgcggatttctttgctttttctggccataagatggctgcaccaacagggattggtgtcctctatgggaaggaagaaatcttagagcaaatgtctccgatcgagtttgggggcgagatgattgactttgtttacgaacaatctgcatcttggaaggaattgccttggaaatttgaagctggaacacctaatatggcgggagcaattggtctcggtgtagcaatcgattacttagaagagctggggatggaccaggtagaagcgcatgagcaagaattgattgcctatgtgtttccaaaattacaggcgatcgaaggcttgaccatttatggttcccaagacttagcaaaacgttctggcgtcatttccttcaatctaggagatctccatccgcatgacttagcaacagcattagattatgaagggattgctgttcgtgcaggtcaccactgtgcacaaccgctccttcaatacctacaagttccagcgacaacgagagcaagtttttatatctacaacaccaaagcggactgtgataaattaattgaggcattgatcaaagcaaaggagtttttcaatggcactttctaaattagattcgctgtacatggcggtcgtagctgaccattcaaaacaccctcaccatcagggccagattgaagatgttgatcagatccaactcaacaatccaacttgtggagatgtgatccagttaagtgtgaaatttgatgagaatgacagggtggaagatatcgcctttgttaattcaggatgtacgatctcaaccgcttcagctagtatgatgacggatgctgtaatgggaaaaacaaaagaggaagtcgaagaattggcgcaggtcttttcagaaatggtccaaggccagtcagatcctcgccaagaggaattgggagacgcagccttcttatctggagtctcaaaattcccacaacggattaaatgtgcgaccctctcatggaatgctcttaaaaaagcgatcgaacgtagcaaatagttaaaagaagaaacagagaaagaaaggaaattatggctgaagaaagagtcgaaccgaaaccaattgatctcggtgaatataaatttggatttcacgatgatgttcaacccattctctctaccgggaagggattgaatgaagcggttattcgtgaattgtctgcagcaaaaaatgaacccgaatggatgctcgaattccgtttgaaatcttttgaaaccttcaaaaagatgcccatgcaaacctggggagccgatctatcagagattgactttgatgatttgatctattatcaaaaaccttcggataaacctgcccgttcatgggacgaagttccagagaaaatcaaggaaacctttgagcgtatcgggattcctgaagcagaacgtgcttacttagcgggggcttctgctcagtatgaatcagaagtggtttaccacaatatgaaagaagagtttgaaaagttggggattatctttaccgatacggattctgctctaaaagaatacccagaccttttcaaacagtattttgcgaagttggtaccgccaacggataacaaattggctgccctcaactcagcagtctggtctggtggaaccttcatttatgtaccaaaaggcgtaaaagtagacgttccccttcaaacttacttccgtatcaacaatgaaaatacaggtcagtttgagcgcacgttgattatcgtggatgagggagcaagtgttcactatgtagaaggctgtacagcgccgacctactcaagcaatagcctccatgcagcgattgttgagatctttgccttggatggtgtttatatgcgctacacgaccatccaaaactggtctgacaatgtctacaacttggtcaccaagcgggccaaagctcaaaaagatgccacagttgagtggatcgacgggaacttaggagcgaagacaaccatgaagtacccatctgtttatctggatggagaaggagcgcgtgggaccatgttgtccattgcctttgcgaatgcaggtcaacaccaagatacaggtgccaagatgatccacaatgcccctcacactagctcgtctatcgtatctaaatccatcgcgaagggtggcggaaaggtagactaccgtggacaagtgacctttaacaaaaattccaagaaatcagtttctcatattgagtgcgataccattattatggatgatttgtcagcatcagataccattccatttaatgaaattcacaactcacaagttgctttggagcacgaagctaaggtttcaaaaatctcagaagagcaactttattatttgatgagtcgtggtctgtctgaatcagaagcgacagaaatgattgtcatgggatttgtagaaccctttacaaaagaacttccaatggaatatgccgttgagttaaaccgacttattagctacgaaatggaaggatctgtaggataattcgttttaatagcaaaataaaatcacaatggatttgactccattgtgattttattttgcttataatttttcgttgacataacggacgaattcattccaccaaacctttaagaaaaagcttttctcaatggttcttcctgctaccatatcgactgttggttcttgatcttctaagtagccacgtccgattttatctggatcagtgtagtgtaattttccaagacttgtgcctgatttgacaggtgctcggaatgattcttggttactcttgaattgaatttttggttccgcttggctgccttgcttttcgacgatatagaagtctttttttgcaacagctaaaacagtctctgacttcccatccatgatagttgccttactttttccgtagggatctccttttttgacgacgatggaagaaacaaaggtccgtaccacgtagttcatcagagaagaagtagccacaaagcgtgcgtatggatcaccgtcaactgcctcaactcctaggacaactgtgatcatatggatgccattttgcgtcgttgatgcagcaaaggtgatgcctcctttggtagagttgctgacccgaaggccgtcaacgcctgaacggtaattcggcatgccttctagcatcagattggggttttcaatctgcgtgtttgaaaaaagagcagtgggttttgaagtatatttggtcacttcaggaaaatcctggagtaagtgcttggcaataacagcaatatcataagcactcaattgattttcgtcttctttcccgtcaggatctccattgatggtttgagtatttaatccggtagcattgattaaatgaggagattgaatgccccattcagaaagtttttgcttcattttttcaacgaagcttttctcagagccccccactttctcagctaaggccaaggcagcggtgctagaatttccaactaaaagagcagtcaatagctgatcaaccgtatattggttcgcctccataggaagagtaccagcaccttcgatatcatttaaggccagagctttctcagacaatttaataggatctttcagagaaagttttttttcatgaatggcttcgaaaatcagataagtggtcaagagtgtagatagtccccccacatctcgccttttctctgaatccttttcatataagattttacctgtatcagcttcaacagcaatagcactttgagcaggaagatctagatcgtctgctagaacgacatgataaggtaaactgcataacagcaggatgaaggttaaaaaagaaagaaagaattttttcacagttgtttcctcgttgcttagtcctctctattgtatcatacaaatgattaatggaaaattgtaaaatcatcaattagcctaaaaagtcagtcatagcaaggtttttgaatagtgaaaaatcaaatattcagaaaatttagtttacttttttttctacttgtgatataatcttaaacaaatctaaaaaaactattggagaattcctatgaaaaaaggtaaagtattcgcagttgccggagtaacactccttgcagctggattgttagctgcatgttctagttcaaatactagcaaagcaagctcaggcgaagacaaaaactatggttatgtctacactactgacccaacaactttggactatactgtgtcttctaaatctgccactcaagatctcactacaaacatcgtagacggtttgatggaaaatgacaagtatggaaatcttgtgccatcacttgcggaagattggtctgtttcaaaagacggtttgacttatacctacaagattcgtaagggtgttaaatggtacgatgcagatggtgaagaacgcggtgaagtgactgccaaagacttcgtgactggtttgaaacatgctgctgataaaaaatcagaagaacttccactagttcaaggctcaatcaaaggcttggatgattatgtgcaaggaaaaactacagacttcagccaagttggtgtcaaagcggttgatgattacacacttcaatatacattgaacaaacctgaaaccttctggaactctaaaacaacaaacggaatcttgttcccaattagcacagatttcttgaagagtaagggagatgattttggtcaaccaaacgatgtgaaatcagtacttgcaaacggaccattccttcttaaatctattacatcaaaatcatctgttgtatttgaaaagaatgacaactactgggataagaaaaacgttcacgtcaaggaagtaaaacttacttattacgatggatcagaccaagattcattggcacgtggtttctctgatggagcttatacagctgctcgtcttttcccatcaagctcaaactttgcaacagtagagaaaaaatacaaggacaatatctataacacaccagctggttcaggtgtagcaatccttggtttcaacatcgatcgtcaatcttacaaacatactgcaaagaaatcagatgctgaaaaatcttctactaagaaagcaatcttgaacaaagatttccgtcaagccatcacttttgccttgaaccgtgaaaactactcagcacaagtcaatggtaaagaatttgctaaaccagctatccgtaatacatatgttgcacctgcattcgtacaagtagatggaaaagacttcggaaatgtagttgcagataagttgactacttatggagaccaatggaaaggtatcaaccttgcagatggtcaagatggtctttacaacaaagataaagcgaaagcacaacttgaaaaagccaaagctgaacttcaaaaagacggcgttcaattcccaattcatattgacgttcctgttattcaaaatgcaacaagtatagttacacgtatgcaatcattgaaacaaacggtagaagaaactcttggtaaagacaacgtagttgttgaccttcaaatgatggaccaagacgaagtgttgaacatcacattgaatgttccatcagctgcagatgcagattgggatcttcaaggtatggtcggttggaacccagactatcaagatccatcaacttaccttgatactctccaaccatcttctgaagaccaaacaaaagtctaccttggttttgcaggtggtgtagataacccatcagctaaagctgtcggtttggatgagtttgcaaaacttcttgacgatgcaaacaacgaaacacaagatgttgtgaaacgttatgaaaaatatgcagcagctcaagcttggttgacagatagcgcgattgtagtacctacaatgtcatcatcaggcgcagcaactgttatctctaaagtggtaccattctctggtgcttcagctcaagctggtaacaaaggttcagcatacttcaaatatgtagaagttcaagatgaacctgttactaagaaacaatacgatgaagctcttaagaaatggcaaaaagaaaaagctgagtcaaacaaaaaagctcaacaagatcttgaaaaacacgttaaataattaaattattgcttttcattagaactttctcttctaggggagaaagttcttttggacattaaaggaatgaaatatgaaaaaatatgtttttatgcgtattttgcgttcgttagtgtcgatctttctcgtcacgacattaacctacatgattatctatacgctaacaccgagaaatctcatctttaaaaatgaccccaactacaataaagtagcgaagacaaaagattcgaagatcaactacgaaaatactgtctacgatcgcatgggttatttggaatacatggattcaaagagcttgcaacaaaaagcaagtaaagaagattcttccgtaacggttgatgcgacaactgctaatgaaaagatctacaaaaaatatattgaaaaattaggtcatggttggcagttgaaacgtttcccggaaagtaagtctttctatgcggtgcgtgaaattccggtttttgaacgtgtcatcagcttctatgcgaatttgattcagtttgatcatccaggttgggtgaaagatgcctcaaatccaaatctcaaacgctatatccgtattgaaaatgatccatctattggatggtctgtagtgggttctggtacgaaacacaaatacctcttgtactttaatggtcagttcccatatgtacaccaaaactttgtgaccttaaaccttggaaattcatatccaacttattcaaatacccctgttcttcaagttattacccaaggacaaggaacgactaagaagagtgaagtgaacttcccaacaggtaaaaagacatcttccatcgatatctactcacgtacctacaaatcaccaagtaaggcagactcacaagatatcagtcgatttggtaaaggggatgcctatacagcaacgttgagcaactatgagaatccatccatgattgcatcttcttcaatcattggtttgattggtattgcgattgcctacttgattgcgatcccattaggatcttatatggctcttttcaagaactcatggtttgatagcatctctactgcggccttgacatttatgatgtctctcccaaccattgcccttgtctatatcgtgcgtctagcaggttcattctttggacttccagactcattcccagtacttggagcacaggactggcgttcatatgtattgccgtctctgattcttggtttattgagtgcgccatttatcgccgtttggattcgtcgttacatgatcgatattcactctcaggatttcgtccgttttgctcgttcaaaaggattgtcagaacgtgagatctcaagaaaacacatcttcaaaaatgcgatggttccactagtttctggaattccaggggctatcattggagttatctcaggtgcgacgttgactgaaacagtcttcgctttcccaggtatgggtaaaatgttgattgactctattaaagcatcaaacaacaccatggtcatcggacttgtcttcatcttcacatcacttggtatctttgctgccatgttaggtgatatcttgatgacagtgcttgatccacggattaaattaacgaatacgaaaggaggcaaataatggctacaatcgataaaaataaatttcagtttgtaaaacgcgatgactttgcctctgaagtaatcgatgctccagcgtattcatactggaaatctgtattcagacaattcttgaaaaaaagaaccactatcattatgcttgctattttgattgggattctcttgatgagttttgtctacccgatgttttcaaattttgattacaacgacgtaagtaaggtaaatgacttttcagcacgtttgaatccaccaagtgccaaagctttctttggtacagataataacggtaaatccctctttgatggagtttggtttggtgctcggaattcaattatcatttccttcatcgccactgttattaacgtggttgtcggagttatcgttggtggaatttgggggatctcaaaatccatcgaccgtatcatgatggaagtttataacgttatttcaaacattccgtttatgttgatcgttatcgtcttgacttactcaatgggatctggtttctggaacttgattcttgccatgtccttaactggatggatcggaattgcctataccattcgtgtccaaatcatgcgttaccgtgatttggagtacaacttggccagccgaacattaggaacaccaactttgaaaattgttacgaaaaatattttgcctcaattggtatctgttatcgtgacacaaacatcacagttacttccaagctttatttcttatgaagctttcctttccttcttcggacttggtcttccaatcacagttccaagtttgggacgcttgatttctgactattctcaaaacgtaactacaaatgcctacctattctggattccgcttactgttttgattttagtatccttgtcattctttatcgtcggacaaaacttggccgatgccagcgacccacgtacacatagataggaggagtagatatgacatcaaataacaatattattttatctgctcaagatatcgtagtggaatttgacgtgcgcgatcgcgtattgacagctattcgtggcgtatcgcttgagctagaagaaggtgaagttcttgccttagttggtgagtcaggttcagggaaatcagttttgacaaaaacgttcaccggaatgttagaagataacggccgtattgcccaaggttcgattaaataccgtggtcaagaattgacagatttgaaatcgaataaagattgggaaaatattcgtggatctaagatcgctacaatttttcaagacccaatgacaagtttggacccaatcaacacaattggttcacaaattacagaagtcattatcaaacaccaagggaaaacagctaaagaagctaaagaaatggctttggactatatggagaaagttggaattccagatgcggaacgtcgttttgatgagtatccattccaatattcaggtgggatgcgtcaacggatcgttattgccatcgccttggcctgccgtccagatatcttaatctgtgacgaaccaacaacagccctagacgtaaccattcaagcgcaaatcattgatttgttgaaatcccttcaaaaagaataccaatttacagttatctttatcacccacgacttaggtgtggttgcaagtattgcagataaagtagccgttatgtatgctggagaaattgttgagtttggtaaagtagaagaaattttctacgatccaaaacatccatacacatggagcttgctttcaagcttgcctcaattgtcaacctcagatggtgatctttactctattccaggaactccgccatcattgtatgctccaatcaaaggagatgccttcgcacttcgttcagactatgcaatgcagattgattttgaagaagaggcacctgctttcaaagtaaccgatactcactgggctaagacatggttgctccatccagatgcaccaacagttcataaaccagaagtaatcgaaaaccttcacgaaaagattggctcaaaaatgggcttcactcacattacagaataggaggaaggaaatgactgaaaaattagttgaaattaaagatttagaaatttccttcggtgaaggaagtaaaaaattcgttgctgtaaagaacgccaactttttcattaataagggagaaactttctctcttgttggtgaatcaggaagtggtaagacaacaattgggcgtgcgatcattggtttgaatgatacaagtgctggagaaattatttatgacggtcgcaagatcaacggaaaaaactctcatagtgaaaaatcagagttgatccgtaaaattcaaatgatcttccaagacccagcagcaagtttgaatgaacgtgcaacagttgattatattatctctgaaggtttgatcaaccaccatttgtttaacagcgaagaagaacgtcaggaaaaagtaaaaaatattatgcatgaagttgggcttctagcagaacatttgacacgttatcctcacgaattctcaggtggtcaacgtcaacggatcggtattgcccgtgcacttgtcatggaaccagaatttgtcattgcggatgaaccaatctcagcccttgacgtttcagtacgtgcacaggtcttgaaccttttgaaaaaattccaaagagaattaggcttgacctatctctttatcgcccatgacttgtcagttgtgcgcttcatttctgaccgtattgcagttatctataaaggggttattgtagaagtagcagaaactgaagagctatttaaccacccaatccatccatacacacaatccctactttcagctgtcccaattccagatccaattctagaacgtaaaaaagttctaaaaatctacgatccagaacaacatgattactctgaagataaaccacaaatggttgaaattaaaccaggtcattatgtatgggctaataaagctgaagaaaacaaatacagacaagaatataaatagagaggattccctctctatttttttatttcaaaaaaactttcaaaaaaataaaaaattttggaaaaaagtgttgacagtaaggagaggtcatgatatactaatatagttgtcgcgcgagagcgacaaagacctttgaaaactgaacaagacgaaccaatgtgcagggcgctataacgaaagttatagtaactgaacaataaaaaacaataaatctgtcagtgacagaatgagtttaagacaaacaattattttaatgagagtttgatcctggctcaggatgaacgctggcggcgtgcctaatacatgcaagtagaacgctgaagcttggtgcttgcaccgagcggatgagttgcgaacgggtgagtaacgcgtaggtaacctgcctcttagcgggggataactattggaaacgatagctaataccgcataaaagtcgatatcgcatgatattgatttgaaaggtgcaattgcatcactaagagatggacctgcgttgtattagctagttggtgaggtaacggctcaccaaggcaacgatacatagccgacctgagagggtgatcggccacactgggactgagacacggcccagactcctacgggaggcagcagtagggaatcttcggcaatgggggcaaccctgaccgagcaacgccgcgtgagtgaagaaggttttcggatcgtaaagctctgttgtaagagaagaacgagtgtgagagtggaaagttcacactgtgacggtaacttaccagaaagggacggctaactacgtgccagcagccgcggtaatacgtaggtcccgagcgttatccggatttattgggcgtaaagcgagcgcaggcggttagataagtctgaagttaaaggctgtggcttaaccatagtacgctttggaaactgtttaacttgagtgcagaaggggagagtggaattccatgtgtagcggtgaaatgcgtagatatatggaggaacaccggtggcgaaagcggctctctggtctgtaactgacgctgaggctcgaaagcgtggggagcaaacaggattagataccctggtagtccacgccgtaaacgatgagtgctaggtgttgggtcctttccgggactcagtgccgcagctaacgcattaagcactccgcctggggagtacgaccgcaaggttgaaactcaaaggaattgacgggggcccgcacaagcggtggagcatgtggtttaattcgaagcaacgcgaagaaccttaccaggtcttgacatccctctgaccgctctagagatagagttttccttcgggacagaggtgacaggtggtgcatggttgtcgtcagctcgtgtcgtgagatgttgggttaagtcccgcaacgagcgcaacccctattgttagttgccatcattcagttgggcactctagcgagactgccggtaataaaccggaggaaggtggggatgacgtcaaatcatcatgccccttatgacctgggctacacacgtgctacaatggctggtacaacgagtcgcgagtcggtgacggcaagctaatctcttaaagccagtctcagttcggattgtaggctgcaactcgcctacatgaagtcggaatcgctagtaatcgcggatcagcacgccgcggtgaatacgttcccgggccttgtacacaccgcccgtcacaccacgagagtttgtaacacccgaagtcggtgaggtaaccatttggagccagccgcctaaggtgggatagatgattggggtgaagtcgtaacaaggtagccgtatcggaaggtgcggctggatcacctcctttctaaggaaatggaaacctgtacgttggtcttgtttagttttgagaggtcttgtggggccttagctcagctgggagagcgcctgctttgcacgcaggaggtcagcggttcgatcccgctaggctccattaacactttagtagtgttaagtttgaacattgaaaattgaatatctatatcaaatagtaacaagaaaaataaaccgaaacgctgtaaatatttaaagagtttaggtcgtaagaccaaaaataaggttaagttaataagggcgcacggtggatgccttggcactagaagccgaagaaggacgtgacaaacgacgaaatgctttggggagctgtaagtaagcgacgatccagagatgtccgaatgggggaacccactagctaatggctagtactcctatctgttaaggataggtagaggaagacgcagtgaactgaaacatctaagtagctgtaggaagagaaagcaaaagcgattgcctgagtagcggcgagcgaaacggcaggagggcaaaccgaagagtttactcttcggggttgtaggactgcaatgtggacttaaagagtatagaagaatgacatgggaaggtcagccaaagagagtaagagcctcgtattcgaaatagtctttatacctagcagtatcctgagtacggcgggacacgagaaatcccgtcggaatctgggaggaccatctcccaaccctaaatactctctagtgaccgatagtgaaccagtaccgtgagggaaaggtgaaaagcaccccgggaggggagtgaaatagaacctgaaaccgtgtgcctacaacaagttcgagcccgttaatgggtgagagcgtgccttttgtagaatgaaccggcgagttacgatatgatgcgaggttaagttgaagagacggagccgtagggaaaccgagtctgaatagggcgcattagtattatgtcgtagacccgaaaccatgtgacctacccatgagcaggttgaaggtgaggtaaaactcactggaggaccgaaccagggcacgttgaaaagtgcttggatgacttgtgggtagcggagaaattccaaacgaacttggagatagctggttctctccgaaatagctttagggctagcgtcgacattgagattcttggaggtagagcactgtttgggtgaggggtccatcccggattaccaatctcagataaactccgaatgccaatgaattatggtcggcagtcagactgcgagtgctaagatccgtagtcgaaagggaaacagcccagaccaccagctaaggtcccaaaataattgttaagtggaaaaggatgtggggttgcacagacaactaggatgttagcttagaagcagctattcattcaaagagtgcgtaatagctcactagtcgagtgaccctgcgccgaaaatgtaccggggctaaaacaatttaccgaagctgtggatacctttataggtatggtaggagagcgttctatgtgtggagaaggtgtaccgtgaggagcgctggaacgcatagaagtgagaatgccggtatgagtagcgaaagacaggtgagaatcctgtccaccgtaagactaaggtttccaggggaaggctcgtccgccctgggttagtcgggacctaaggagagaccgaaaggtgtatccgatggacaacaggttgatattcctgtactagagtatgtagtgaaggagggacgcagtaggctaactaaagcgtgcgactggaagtgcacgtctaagcagtgaggtgtgaattgagttaaatgcttaattctataacattgagctgtgatggggagcgaagtttagtagcgaagttagtgacgtcacactgccaagaaaagcttctagcgtttaaacatactctacccgtaccgcaaaccgacacaggtagtcgaggcgagtagcctcaggtgagcgagagaactctcgttaaggaactcggcaaaatgaccccgtaacttcgggagaaggggtgctggctttcagtcagccgcagtgaataggcccaagcaactgtttatcaaaaacacagctctctgctaaatcgtaagatgatgtatagggggtgacgcctgcccggtgctggaaggttaagaggagtgcttagcgtaagcgaaggtatgaattgaagccccagtaaacggcggccgtaactataacggtcctaaggtagcgaaattccttgtcgggtaagttccgacccgcacgaaaggcgtaatgatttgggcactgtctcaacgagagactcggtgaaattttagtacctgtgaagatgcaggttacccgcgacaggacggaaagaccccatggagctttactgcagtttgatattgagtgtctgtgccacatgtacaggataggtaggagccattgagatcgggacgccagtttcgatggaggcgttgttgggatactacccttgtgttatggccactctaacccggtaggttcatcatctacggagacagtgtctgacgggcagtttgactggggcggtcgcctcctaaaaggtaacggaggcgcccaaaggttccctcagaatggttggaaatcattcgcagagtgtaaaggtataagggagcttgactgcgagagctacaactcgagcagggacgaaagtcgggcttagtgatccggtggttccgtatggaagggccatcgctcaacggataaaagctaccctggggataacaggcttatctcccccaagagttcacatcgacggggaggtttggcacctcgatgtcggctcgtcgcatcctggggctgtagtcggtcccaagggttgggctgttcgcccattaaagcggcacgcgagctgggttcagaacgtcgtgagacagttcggtccctatccgtcgcgggcgtaggaaatttgagaggatctgctcctagtacgagaggaccagagtggacttaccgctggtgtaccagttgtctcgccagaggcatcgctgggtagctatgtagggaagggataaacgctgaaagcatctaagtgtgaaacccacctcaagatgagatttcccatgattttatatcagtaagagccctgagagaagatcaggtagataggttaggagtggaagttgtgtgagcaatggagcggactaatactaatagctcgaggacttatccaaagagtcagaagatattgacaacgtgagtttaacttgttagaatatagatgttcaattttgaatgtttaatcattcagagttaagtgacgatagcctaggagatacacctgtacccatgccgaacacagcagttaagccctagaacgccggaagtagttgggggttgccccctgtgagataaggtagtcgcttagctttattccgccatagctcagttggtagtagcgcatgactgttaatcatgatgtcgtaggttcgagtcctactggcggagtacataagaaagtgaagatcaatttttattgatctttttatttttatcttataaaactaaaggctccgtttttatacggagcctttagttaactagttatttggaaagaatgcttgatataaagctttaatagctttttcttcttgatccttacttacaacgaacataatagagacttcactagaaccttgtgagatcatttgaatattcacttcgttttctgatagtgctttagctgcagttgcggtaacccctacttgacttttcattttttcaccgacgatcataatgattgaaagatcgtgttcgatttcggcggtgtctacttctagcttttgcgttaattgttttaaaatttcttgttctttaattggagtaagctcacgtgaacgtaagataatggacaggtcgtcgataccagttggcatatgttcccaactaatattaagatcttctagtacttgtaaaacttttcgaccaaacccaacttcacggttcatgaggtatttggtcatattgatacttacaaaccctgaatctccagcgattcctacgacagttacatgatcatttgaatgttccaaaacaattcgggtccctgggtggtccggattgtttgtatttttaatgactaatggaattttacctctgtaggctggcacaagagcttcatcatgtaaaactgaaaagccagcataggctaattcacgcatctctttgtaagttaattcaggaatagaatgtgggtgtttaatgatacctggatgtgctgcaaaaataccatttacgtctgtaaagttttcgtataagtctgcttttacacctgctgcaatgatcgatcctgtaatgtcggatccaccacgagaaaatgtacaaatatccccatcttgggtaacaccaaagaatcctggaatgacaatcacttcacttgaatcttttagttcttcaattttatcgtaactagatggtaaaatacgagcgttagaaggttctgcagtgaccgtgattcctgcctcttttggatggatatatcttgcttctaatccattctgattgaaataggcagcaatgagtttagcattgttattttcacctgctgctaagaatgcatcgtatgtaaatggatttccttttttaggcaaatttgtcagatcatagatatcttcagcaatttcctgaataatagaatctttgagacccaattcttctgtaatggcacgataacgttcaataatccactgttgtgtttgtgtgacatccttatctgaagtaaattctttataataccggatcagagcatctgttacttttgtgtcttcagcgttgcgttttcctggagctgatacaactacaaatcttctttctggatcatctttaatgatattaagtactttttttaattgagaagctgatgctagagaacttccaccgaatttagttactttcatattttctccttaatagtttcattaatacattataccaaagttcagttattgatacaatgtatttacaaatagggcataaaataattgattctgtagaggggagaaattgtaattattcaaattttacaattttgttacatcttatagatatattttactattttacttttttgtggtatgatatgttataattcaaaagttttaatgtcaaaatattttatatttaaacaaaaggagtctgtgatgtttgaaacaattttgtattctgtcgaaaacgacctcgcgacaatctctttaaatcgtcctgaagtatccaatggttttaacattccaatgtgtcaggaaattttagctgccctggaagatgcagaaaaaaatgaggaagtaaaattcattattctatcagcagaagggaaaatcttttcagttggtggagatttgagcgaaatgaaacgcgcagtcgatgcggatgacatcgagtctcttgttttaattgctgaattagttaatacgatttcaaagaaaattaagcaattaccaaaaccggttattatggtggcagatggagcggttgctggagcagctgctaacattgcagtagctgttgatttttgtattattagtgatcgtactaaatttatccaagcctttgttggggttggtttagcaccggatgcgggtgggttattcttgttaggaaaagccattggcatgtctcgggctactcatttagtaatgacgggtgaagccttgactgctgaaaaggcatttgattatggcctagcttatcgtgtttgtgaatctgaaagactcgataaaacagttgagcaattgcttaaaaaattaagaagaggatcttcaaattcttatgctgccatgaaagaaatggtttgggaagcattcttgaaagaatgggaccaatatgcgggtcttgaattggatttgcaaaagaaactagcatttacagaagatttcaaggaaggggttattgcctactctgagaaacgtcggccacaatttaaaggaaaataaatttgtaatttttctatgttttgtgaaaaaatgcttgcaaattattttcatttttgataaaatttgactatcaaagtaaaattaggaggtggagttttgaattaccaattagttaacgactatttaacatccatctttaataatgttttggttattgaggagtcgagtctaagagcaagtcgattcaaagatgtttctattaaagaaatgcatacgatcgatgtgattggttcgacaccgaatgcaaccccgagtgatatttcacgggagttgatggtgactttggggactgtcacgacaagtttgaataatcttgagcgcaaagggtatatcgaaagaagaagatcggaagttgatcgccgggttgtacacttgagtttaacgaagaacggtcgtctactttatcgtcttcatcagcaattccataaacggatggtcaaccagattattggagatatgagtcccgaagagaagaaagtgatgcaaaaaggattgcaaaatctgtatcgtttcttggaggaaattaaataatggtctttgctaaaattagtcaagttgctcattatgcacctgaccaagtcgtatcaaatgatgatttggctgagatcatggatacaagtgatgaatggatcagtagtcggacaggtatccttcggcgtcacatttcaaaagatgagacgacaagtgatctagcaacaattgttgcacaaagattattagcaaaagcaaacttagacgctgaggaaattgattttatcgttgtcgctacgattacaccagatagcttaatgccatcaactgcagcccgggtacaagctaatattggagctactcgagcttttgcatttgatctgactgcagcatgtagcggatttgtatttgcattagccactgctgaaaaatacatttcttcaggtatgtaccggagaggaattgtgatcggtagtgagacgctttcaaaagtattagactggtcagaccgttctacttcagtcctttttggagatggagctggtggtgtcttgcttgaagcgagtgatcaaaaatcgtttttggctgaaaatctttttacggatggtagccgaggtgctagtctggagtcttgctatttgggtttgtcttctccttattcagatgaagtttctgatcgaagatatctgacaatggacggacgggcagtatttgattttgctattcgtgatgtcacgaaaagtattcaaaaaattatagcagatgcctctatggaagcagaagagattgactattttctgttacaccaggcgaatgaccgaatgttagataagatgtcaaaaaaactgggtgtctctagagagaaaatcccagcaaatatgatggaatatgggaacactagtgctgctagtatccccattctattatcggagtgtgtcgagaatcatcgaatcaagatggatggaagtcaaaaaattcttctgacaggattcggtggaggtttgacatggggcacacttcttgttacaatctagttaaacatgtggaaacacattttaaaaatttatatattattttttaaggaggcctatcatggcagtatttgaaaaagtacaagaaattatcgttgaagaacttggtaaagaaccatcagaagtaactcttgaatctacattcgaagatttagaagcagattcattggatttgttccaagttatctctgaaattgaagatgcttttgacatccaaatcgaaactgaagaaggattgtctacagttggtgaccttgtcgcttacgtagaagaaaaaacaaaataatgatagatgagagtatcgaaagatattctctcttgtttaggtaatagtttgaggctcaaagaaacaatcttttaaactcaaactattacttaagcgaaaaaagaggtaggtataatgcaaacacgaattactgaactattgaatattaaatatccaatcttccaaggtgggatggcatgggtcgctgatggtgacttggctggagccgtttcaaatgctggtggactcggaattattggtggtggtaatgcccctaaagaagtggtaaaagctaatattgatagagtaaaacaaatcactgacaaaccattcggtgttaatatcatgcttttgtcaccatttgcagatgacatcgtcgacctcgttatcgaagagggtgttaaggttgttacaacaggtgccggaaatccaggtaaatatatggagcgtttccacgaagctggaattacagtaatcccagttattccatcggtagcacttgctaaacgtatggaaaaacttggagcggatgctgttgtcgcagaaggtatggaagctggtggtcacatcggtaaattgacaactatggctcttgttcgccaggttgcggatgcggtatctatcccagttattggtgctggtggtgttgctgatggacgtggtatggctgctgttcttatgcttggagcagaagctgttcaggttggtacgcgtttcgctgttgctaaggaatctaatgcacaccaaaacttcaaagataagattttgaaggctaaagatattgatactgttatttcagcctcagttgttggacaccctgttcgtgcgattaagaataaattggctacagaatataaccaagctgaaaaagatttcttggctggtaagaagactcaagaggaaattgaagagcttggtgcaggtgcccttcgtaacgctgttgttgatggagatgtggaatatggttcagttatggctggacaaattgcaggtcttgttcgtaaagaagaaacatgtgcagaaatcttggaagacctttacacaggtgctgccaaggtgattaaagaagaagctgctcgttgggcagatgtaaacgtctaaaaacgtcgaaaggattaggatagtgacaaaacgtgcgttcttatttgctggtcaaggggctcagaaattgggcatggcgagcgatttgtatgcgacttatcccgttgtcaaagagacatttgatacggctagtcgtattctaggttatgatttgcgtgaattgattgattctaacgaagaaaaacttaatcagacacgctatactcaaccagctattttgacaacgtcagtagccatttatcgccttttggcagaaaatggtatcactcctgatattgttgccggtctctctttgggtgaatattctgccctagttgcggctggagcactctcatttgaggatgcggtagccttggttgctaaacgtggagaattcatggaaacagcggctcctgctggaagtgggaaaatggttgcagtcatgaatacagatccaagtttgattgaagaaatctgtcaaaaagcatctgaaaagggtgtggtaacgcctgctaactataatacaccagcacaaattgttattggtggtgaggttgcggctgtggactatgctgtggaactattgcaggaagcaggtgccaaacgcttgatccctttgaatgtgtcaggtccattccacacagccttactggaatctgctagtcaaaaattggcggctgaactagaaaaagtatcatttaatgattttgatcttcctttagttgggaatacagaagctactatcatgaagtcagaagatgtgaaagcacttttggcccgtcaagtaaaagaaccggttcgtttctatgattcaattgctacgattcaagactttggtgtagatgaagtcatcgaaattggacctggaaaagtcttgtcaggattcttgaagaaaattgataaaactcttccaactcataacgtcgaagatcaggctagtctagatgcacttctgaatgcttaaaacgaggtaaagatggaacttaaaaataaaaatgtttttgtaacaggttcaacacgcggaattggattggctgtggctcataaatttgcgagtctcggtgccaatgttgtcctaaatggacgttctgaaatttctgaggacttgcttgcacagtttgctgactatggtgtgactgttgttggtatttctggggatatttctaatggcgaagatgcgcaacgtatggtggctgaagcaattgaaaagcttggaagtgttgatgttttggtcaataacgctggcatcacaaacgacaagttgatgttgaaaatgactgaagaagattttgaacgggtcttgaaaatcaacttgacaggtgcctttaatatgactcaagctgtcttaaaaccgatgtctaaagctcgtcaaggggccattatcaacatgtcctctgttgttggtctaatggggaatatcggtcaagctaactatgcggcttcaaaagctggtttgattggtttcactaaatcagtagcgcgtgaagttgcggctcgtggcgttcgtgtgaatgccattgcacctggtttcattgaatcagatatgactgatgctattccagagaaaatgaaagatgccatgctagctcaagtgccaatgaaacgaattggtcaagctgaagaagtggcagaagttgcggctttcttagcaggtcaagaatatttaactggtcaaacaattgccattgatggcggaatgactatgcaataatgaatgctcactgatcgaaaatcacttacttaaatatccatccgacaaaaggagaatatatatgtctacaaatcgtgttgttgttacaggttacggtgtaacctcaccaatcggaaatacaccagaggagttctggaatagccttcatgaaggaaaaattggaatcaagcccattacaaaatttgatgcttctgaaattccagtctttaatgctggtgaaattcaagatttcccattcgataaatatttcgtgaaaaaagatcaaaatcgtatggatacttactcattgtatgcaatctatgctgcgatggaagctattgaaaattcaggcttgaatatggaagaagaagaccgcgatcgtgtaggtgtgattgtctcatctggtatcggtggtttgcaagaattggaagatcaaattatccggatgcatgaacgtgggatgaagagaatccaaccaatgtttattccaaaagctctttcaaacatgggtgctggaaatatcgcacttaagattggggctcaaggggtatgtaaatccgtgacaacagcttgtgcttctgccaacgatgccattggtgaagctttccgtgaaattaaatttggtatgcatgatgttgttttggcaggtggtgctgaagcttcgattactaagattggtatcggtggtttcaatgcccttacggccctttcaacaacggaagacccagaacgttcatctattccatttgacaaagaccgcaatggttttgtgatgggggaaggtgcaggggttcttgtcatcgaaagtttggaacatgcccaaaaacgtggtgctaatattttagctgaaattgttggttacggttcaaactgtgatgcctaccacatgacaacaccaacaccagatggttcaggtgcggctaaagcgattaaattagcgatcaatgaagctggtatcaaacctgaagatgtcgattatgtcaatgcgcatggtacctctacacctgccaatgagaaaggtgaaagcggagctattgtttctgtacttggtaaagaagttcctgtatcatctactaaatcatttacaggacacttgcttggtgctgctggtgcggttgaagcgattgctaccatcgaagcgattcgtcacagctttgtaccaaaaactgctggtaccaaagaattgtctgactatatcgaagcaaacgttgtttatggtgaaggtcaagaagcggatattcagtatgctatctcaaatacctttggttttggaggacacaatgctgttctggcctttaaacgttgggagggttaattcatgaatatttctgaaatcaaagatttgttggctcaatttgatgcttcaactttgcgtgaattctcatataaaaataatggcgaagaattgaatttgagtaaaaaccaaacgagttcagttgcggctacagcggttgctcctgcagttgaagtggtagcaactcctcaaactcctgtagtagcccctgttgttgaagccccagcaactccagctgtagcggctgaaccagttgctgctccagctcaggctgcagaaggtgatgtggttgaaagtccattggttggggtggcttacttgtcgccagcaccggataaatcagcctttgtatctgtaggagacaaagttactaagggtcaaacactcttgattatcgaagccatgaaagtgatgaatgaagtcccagcacctaaagatggggtagtcactgaaattttggtaacgaatgaagaaatggttgaatttggaaaaggattggttcgaatcaaatgacaattgatattaatgctattcgtgaggctttgccgcatcgttacccaatgcttttggtggatcgcgtattggaaacaagcgaagatacgattgttgccattaagaacgtgacaattaatgaaccattttttaatggacattttccacaatatcctgttatgccaggtgttctcatcatggaagctttggcacaaacagcaggtgtactagagttgtcaaaacctgaaaataaaggaaaattagtcttttatgcagggatggacaaggtgaagtttaaaaaacaagtcgttccaggagatcaactggtgatgacagctacttttgtcaaacgtcgtggaaccattgctgttgttgaagcgaaagcagaggtagacggtaagcttgcggcttcaggaacgcttacgtttgcaattggaaattaagaaaggcctatctatgtttcgtaagatcttaatcgccaatcgtggtgagattgcagtgcgcattattcgtgcggctcgtgaacttggcatcgagacggttgcggtgtattctactgctgataaagaagccttgcataccttactagcggatgaggcagtctgtattggccctgctaaatcaacagaatcttatttgaatatgagtgctgtcttgtctgcagctgttctaacaggagcagaagctatccaccctggttttggatttttaagtgaaaactcaaaatttgcgaccatgtgtgaggaagtgggcattaaatttattggtccttctgctaaagtcatggatttgatgggggataagattaatgctcgtaaacagatgatcaaagcaggagtacctgttattcctggatcagatggtgaagtgtatactgctgaagaagccctcgagattgcagagcgtattggttaccctgtgatgttgaaagcatctgcaggaggcggtggtaaaggaattcggaaggttgaaaaaccagaagatttggttgctgcttttgaatctgcttcctcagaagctcaagctgcttttggaaatggtgccatgtatatggaacgggtgatttatccggcacgccacattgaagtacagattttagcggatcagcatggacatgttattcacttaggtgaacgcgattgttctcttcaacgaaataaccaaaaagttctagaagaatccccttcgattgctattggaaaaacgcttcgtgatcggattggttctgcagctgttcgtgcagctgaatcagttgggtacgagaatgctggaacgattgaattcttgtatgatgaaggcaagggtgagttctactttatggaaatgaatacccgtgtccaagtagagcatcctgtcacggaatttgtaacaggagttgatatcgttaaggaacagattaaaatcgcagctggccaagaattatccgttactcaagaggatattgtcattaaaggccatgcgattgaatgccggatcaatgcggaaaatccttccttcaactttgcaccaagcccaggtaagatcaccaatctctatcttccaagtggtggggttggcttgcgtgtggattctgctgtgtatcctggttatacgattccaccatactatgatagtatgattgccaagatcattgtccatggtgaaaatcgctttgatgcactgatgaaaatgcagcgtgctctttatgagttggaaatcgatggtgtcacaaccaatagcagtttccagttggatttgatttcagattcacatgtgatcgctggtgattatgacactgcatttttgatggaacaattccttccaaattataataaggaatgatgaaaaagcctggacttgtgagggaagtatgaacatcatcttcacagtttcaggcttttatagtaatgctgcagatactgtagcatattataaggagtaagtaatggcattattttctaaaaaagataaatatattcggatcaatccgaataggtcagcctggaaggagcctcagccaaaacctgaagttcctgatgaactattttcacaatgcgcaggttgtaaacataccatttaccaaaaggatttaggtagtgaacgggtatgcccaaactgtggctataccttccgtatttctgctaaagaacgcttggcgctgacagtggatccagctagctttgaagaaatgtttataggaatcgaaacgacagatcctttgaattttcctaattataagaagaaactagcagcagtgagggaaatgacaggactggatgaagctgtcctgactggaactgccttgattaaagggcaaaaagttgcgcttgggatcatggattccaactttatcatggcttcaatgggttctgtagtaggtgaaaaaattactcgtttatttgaatttgcgacaaaagaaaaattgccagttgttctatttaccgcttctggtggtgctcggatgcaagaaggaatcgtgagtttgatgcaaatggcaaagatttctgcagctgttcaacgccattccaaagaaaaattattctatttgacggtattgacagatccgacaaccggtggggtaacggcttcatttgctatggaaggtgatattatcatggcagagagtcaagccttggtcgggtttgccggtcggcgcgtgattgagtctactgtacgtgaacaattgccagatgatttccaaaaagcagaatttctacaagaacatggatttgtagacttgatcgtggagagaagccaaatccgagcaacagttggacaattattggcccttcatggaggtaaacatgagtaaaataacacagattattaaagaggcacgtgaccaaggaagattgactgcgcttgattttgctcaaggaatttttgatgattttatcgaattacatggagaccgaaacttccgtgatgatggtgcggtgattggtgggattggacgattaggcgatcaaacggttacagtcgttgggatccaaaaaggaaaaaatcttcaggataatctaaaacgtaattttgggcaaccccatccagaaggctatcgaaaagctttgcgcctcatgaagcaagcggagaaatttggtcgtccagttgtgacctttatcaatacagcgggtgcttatcctggtgttggtgctgaagaacgaggacaaggggaagccattgcccgcaacctcatggaaatgagtgatctaaaagttccaattatcgcgattatcatcggagaaggtggctctggtggtgccttggctcttgctgtggcagataaggtctggatgcttgaaaattccatctatgcggtcttgagtccagaaggttttgcctctattctttggaaagatggaagccgtgccatggaagcagcagagttgatgaggattacttctcacgaattgttaaatatggaaattgtcgataaggtgattcccgagcatggattttcgaatggggaactactggctcaagtgaagaaggaattacaggaagagttaaaggttttacaagctttacctctcgaagagcttctagagcaacgctaccaacgttttcgtaaatattaaaaaactgagcttgcaatttgcaagactcagtttttttaaactttattttggtgcgatgacttctgcgccacccatgtatgggcgaaggacttctggaatggtcacagaaccgtcttcgttttggtagttttcaagaatagcagcgacggtacgtccgacagctaaccctgaaccgttcaaagtgtgaaggagttttaccttgccatctgcttcatcacggtagcggatttgcgcacggcgagcttggaaatcttctgtattagaacagcttgagatttcacggtaggtgttttgcgctggaatccatacttccaagtcataagtcttggcagctgagaagcccatgtctcccgttgagagagctaccacacggtatggaaggttgagtttttgaaggatattttcagcattgacaaccattttttccaattcatcatatgattcttctggtttggcaaatttcaccatttcaaccttatggaattggtgcaaacggatcaagccacgggtatcacgaccggctgaaccagcttctgaacggaaagatggactcatagcggtgaagtagattggaagatctttcccatcaagaatttcatcgcgatagtagtttgtcaaaggaacttcagctgttggaatgaggacataattggtatcgctaagttcaaaagtatcttccttgaattttggatattgaccagtaccaaacatagaatcatggttgaccatgtaaggagggatgacttcagtgtagccttccttgccatgttcatccaacatgaagttgtagatagcacgttctaagcgagctccaagtcctttgtagaagaggaaacgagcaccagtgactttagccccgcgttcccagtcaaggataccaaggtcttcacctaaatcccagtgagcttttggttcaaagccaaattcgcgcggtgttccccaacgacgaacctcaacattgtcatcctcatctgctccaacagggacactatcagcagggatgtttggaagggtagtagtgaattcagttaattttgcatcgatttcagccaattctgtatccagggctttgacttcagcagagagggtttgcatggcagcaatcttatcatctgcattttccttgttgcgtttagcttgtgcgatttcagcagatacagtgttacgctctgctttgagattttctactttgactaagatatctcgacgtttggcatcgatttctttcatttcattcaaaatagctgcatctacgccacgtgttgccaattttttagcaaccgcatcaaagtctgtacgaatccgtttaatatctaacatagcttctcctttaacaaaaaacacacctgttagagtgttggagtggcagagccacggttccatccaacttcacaggtgtgcacttgattcaatattgtattttaaagaaacggtagaatttcaattaagatttctatctgctcgcagcaaccgcagactttctgaaagagcctcttaacttacttatccgtttgcgtctattatacaagaaaagatcctattttgcaaatagatttttaattttagccgtgatggtttggatcaatgtaggaagtttgacaattttatcatttcctagatgttcccgagcaatctttaaaatttttccagagtcttttgaagcaaagagaaattttgattctctagtatagatttcaaaatggcggctaattttacgtccggatacattggctccgatttgatcgatttcttgccagggaatttggatgtagtcttcaacattagcatccgcataaaattcaaaagcggcattcccgactaggatttttccaacctttccccccactccaaggtaagaaacccctgtagtatggaattcaacggttttattcaatgattgagccatgagatcctcctgtattgctattcattccattatatcataataaaaagaaggtcgaaaccttcttttttgttgatctttgcttacatcaagccagcaacgtgtgccaagacaccgattacaaagagggcgatgatgatagtgattggagatactttcttcttaagcaaccacatacaagcgaaagtaagaagcaatcccatcaaaccaggaatcaatgaatccaagttttgttggaaagttgtaactttttcaggtgtttgagatagacctgaaccaacttgagcgaaggcttcttggatacccttgtatccttcaggaagtttatcccagtggatataagctttgtcgtctaatttgacagaagaaacattgaagacgaatttaatagatacccaacgttctaccaagacagcgaggatgaacatcccaaggatagaagcccctttagtgatgtcttgcaagatcccaccagacatatctttggtaatttcagaacctgctttgtagccaagttcttgcgtgtaccacaagaaggccatacgaatcgcattccatgcgataaagaagatgagtgggccaaggatgttaccagacgcagcaagtgatgcaccaagagccccaagaattggacgtactgtaaaccagaagactggatctccgatacccgccaaaggacccatcataccaattttaaccccttggatagcagcatcgtcaatagcagcaccgtttgctctttcttcttcaagagcaagcgttaccccgatgataggagcggcaacgtatgggtgagtgttaaagaattccatgtgacgctcaagagcagccgcttggtcttctttctttgtgtagagttttttgatagctgggatcaatgagtatgcccaacccaagttttgcatccgttcatagttccaagaaccttgcaagaaggttgaacgccaccaaactttttgacgatctgatttagataattgtaatttttcagtcatgatagtgtcacacctttcttaatagtcttcgagaatgtcgccaattggatcgttagaagtagcggcaccgccacctccattgccacctttcttagaaagagtaaggtagatcaaggcaagggcaacaccaattgctccaagggcaatcaaggtcaattggctaacagctgcaagagcaaaaccgatggcaaagaatggccatacttcacggctcgccatcatgttgataaccatggcataaccaacggctacaaccataccaccaccgatttgcattccatcagagagccattttggcatttgttcaagagcagttttgacagtttcagcaggaatcatcaacaagagggctgcaggaatggcgatacgaagaccttgaagaagaagggccacaaagtgagcgcgttctacacctttgatatccccttttctagcagcagcgtcggcagtgtgaaccaaaccaacggaaagggtacggacgatcatggtcaagaaaagaccagcaactgcaagtggaatagcgacactttgagcgacagcgattccttttgtactgaagtctcccccaagtaccatgatgatggcagcagcgacagatgcaagggcagcatcgggtgcaactgcggcaccaatgtttgcccagccaagtgcaataaattgaagtgaaccaccaagcataatgccagcagtcaaattacctgttaccaaaccgattaaggtacaagcaacaaggggttggtggaattggaattggtcaaggataccttcaagacctgctaagaaggcaacaacgaccactaataccatagaaataatagacatgtttaaaatcctttcgtaagtaatcgattattgaacgttagctttgttaattaagtcaaacaaatctttcttagagtcatttggcactttacggacgtcaaattcaactccaagatcacgcattttttcaaatgtagccacatcatctttatccattgataacacattgttaaccatggttttaccagttgagtgggccattgaaccaacgttcaaggttttaatcggaacaccaccttcgatggcgcgaagagcatcttgaggtgtttcaaataagatcaaagcatgggtatttccaaaacgtggatcttttgcaacgtcgatcaatttttgaattgggacaacgtttgctttcacaccatttggtgccgcttgtttgatcaattccttacggagttcatctttggcaacagaatctgaagcaacaatgatccgatcggcttttgaatcaggtgtccaagcagttgcgacttgtccatgaagaagacgtgtatctaagcgggcaaggttgatcttgagttttccatctccgataaccgttccttctggaatagcagcttgggctacaggagcagcagcggctgtactagcttcttcaacaggattcaattcttctggaagagctttgacaccgtcttttgcttccttaatgatgtttgcagcgacttgatcaacgccggcatttgcatccatcaaacgttctgtataagcttgaatcaacatcggaaggttcaatcctgtgatgatcgcaaatttacgatctggattttctcccatgacgcgacttgcttggttaaatggagaaccactccaaaggtcagccaaaaccaagacttcatcttctgcatcaaatgcggcaacagctgcattgaatttagcatagagatcatcagggccttcacttggcatgaacgtaaccacttgaactttctcttgatccccaaagatcatcgagccggattggtggattccagctgcaaattcaccgtggctagcaataatgataccaatactcattattgacattcctccttataaaatttgtttgactttcagtttaagaaaactttaagctactttattataaatcgtttccacacttaagtcaatttttctatcaaaatctcgatgtaaaaatattaatttattatattaaattatcgttagatagaaaaagaatgctcttgaatgcattttgtttattacttgttgatgcttaaaaaaacaataatagatatgttttataggattttgttcttaatgaaaagattccgacaatcaaacgatattctcgaaaataaaaataaatatataataaattttaaaatagagtgattggaagcactaaaaaagactagcccagttgggctagtccggtaggttcagttgtttagtttgtaaagtcaagtaccatacgtccttgaatggttccagcttccatttcgtcaaagactttgacagcatcttccactggacgtttttgaacgacaggaacgaccaagccttctgcaccaaattggaaagcttcttccaaatctttacgagttcctacaagagaaccaatgacttggataccatctaatacagttttcacaatgctgagatccatcatttcagaaggaagaccaactgcaaccacgcggccgcctgcacgaacagaatctactgcttggttgaaagctactttagaaacagctgttacgacagcagagtgagctccaccatttgttttttctttaatcaatcctgggacatcttcaacttcgcgaccgttgatgacaaagtctgcaccaacttctttcgccaattctagtttatcattgttgatatcgacagcgatgacatgtgcgttgaagactttcttagcatattgaacagccaagtttcctagtccaccagctccatagataacaatccattgtcctggttcagctttggcttctttgatggctttataagtggtaacacctgcacacgtaatagaagatgcttgggctggatctaatccttcaggtactttcactgcgtaatctgcagtaacgatacattgttcagccatccctccatcaacagagtaaccagcattttttacagtacggcaaagagtttcacgaccagttgtacagtattcacaagttccacatccttcgaagaaccatgcgacactgacacgatccccaacttttaggctcttgacatctggagcaacttctttaacaataccgattccttcgtgtccaagaacacggcctggaactttaccgaagtctccgtgagcaacgtgcaagtcagtgtggcagacaccacagtattcgatttgaacaagagcttcccctgtttcaagtggacgcatgtctttgtttgcaacgatttcaacaccagtaccttctggatttacaacaacagctttcattttgttcctccttaagtgaacgagaagcggtttaaaatttttgaaagcgcttctttaataactatgttaataatatcacaaaccagatgacgaggcaatgaaaaaaatggaaaaaaggggcggtattgattaaccgattaaggatttggcgcagaaaaagacatgaggggataactcatgtctgttagttttataagaataattgaatgagttggcgcgcgacaccatcttcattattcgtgaaatcagtgatggagtctgcataggggagaaggatggagctggcatttttcatggcgtatccataaccagcaagagctagcatctcagtatcattgtgctcatctccaaaggcaatcaaatccttctgatccatattgagtttatccagaaggtaggttagagcggatgctttggtcacattttttggattgcattccaaaatatttaagggaccaccccaagtattgatagacagattgtagtcataatgccgattcatttcatctgccagagcatatttgtcttccgctttcgtttgaaagaggatacagtttgggtcgctcgttacccgctcgggattgaattgattttctggttggaaagattcaataccgaataatttagggtctgcaacgtgctcatttggatcggtaataaagaatttattgcggtattcgcctgctataaagtccgcttggatggtatcccggttagcgaccatatctagcaggtattttttatctaaagtcaaacattgttcatccccccattttttctcaggtagatgcgtaagggagccgttaaaattgatcatcggagtatctagctctagttgtttgtaataggtatgtgccatacggtaggggcggcctgttgtaataatgactttatggccaagagcactaattttttttatcgtatcaatggtaaagtcgctcaatttgctttcggaatttaagagagtgccgtctagatctagagcgatcatctttttatgcatatttcagttcctttcgagaagaatgagaccattatatcagaaaaatcggaaaagcgctcaaaaatcgagaagagaagtaggatttcttgaaaggcgaaagatcttttggtaaaatagaaataacgttcgcaaattgattgggagcgagaatgatgaaaaaggagtttattctgaaatggataagttttttaaactttcagaacatggaaccactgttcgaacagaggttcttgctggtttgacaaccttttttgcgatgagttatatcctcttcgtaaaccctcaaatgttgtcacaaacaggtatgccagctcaaggagtcttccttgcaacgattattggatccgttgtcggaaccttgatgatggctttttatgccaatttaccttatgcacaagcacctgggatgggcttgaatgccttctttacctttaccgttgtatttggtatgggctactcatggcaggaagctttgggaatggtcttcatttgtggtgtgatctcattgattatcacattgacaaatgttcggaagatgatcatcgaatcgattccgaccgctcttcgctctgctatttcagctgggatcgggattttcttggcctatgttggaattaagaatgcgggatttttgaaattcacgattgaccctcatacctatacagtggttggagaaggagcagataaggcgaatgcaacgatctcagccaatgcatctgctgttcctggattggttgattttaacaatccggctgtcctcttggctcttgttggtcttgcgattactattttctttgttgtcaaagggattaagggagggattatcctttctatcttagcaacgactgtgcttggaattctcatccatgtggttgatatcactaaaatcgactttgcaagtaatcatctaggagctgcctttaatgatttaggcaagatctttggtcaagctttgggatcaaaaggattgggttctttgatttccaatacgtctcgtttgcctgagaccttaatggcaatcttagccttctccttgacggatatttttgatacaattggaactttaatcggtacgggtgaaaaagttgggattgttgcgacaaatggggaaaaccatcaatcagcgaaattagataaggccctctattcagaccttgtagcgacttcagtcggagctattgcaggaacttcaaacgtaacgacgtatgttgaatctgcagctggtattggagctggtggacgcactggtctgacagccttggttgtagcgatctgttttgctatttcaagtctctttagtccgttgttggcgattgtaccgaccgctgctacagctccaattttgattgttgttgggatcatgatgttgagtggcttgaaaaatatccattgggaagatatgtcagaagcagttcctaccttcttcacctctatctttatgggcttcagctactcgattactcaagggatcgctgctggatttatcacctatagcttagtgaaagtggttaaaggagaagccaaagaagtgcacagcatgatctggatcctagatgttctctttattttaaactacgttagcatggccttgaattaagcatcaagaaagtgccaaaaaggaatgggagttgtctcccattcctttttagttagatcgagggaatgaatgggagaatttcctgttttctttgattcctttttctcaaaaacaaaccggagtcgaacaatttctaaaagaaagagcagatttttaaaaagtttggtataatagagaaatgattagtcataatgaaacggagctgatcgctctaggaaaacagctaggaaaactcttagaaaagcaagacgtgattatcttatcaggtgatctaggagcaggaaaaacgacctttaccaaaggaattgcaaaggggttagggattgatcagatgattaaaagcccgacctataccattgttcgtgaatacgaaggccgcttgcctttataccatttggatgtttaccggattgggaatgatccagattctattgatttagatgatttcctatttggagatggtgctaccattattgaatggggagagctgattgagccgagtctctcggatgcttatctaaaaatttttatccgaaaattagaagatggtcgagagttagcttttgaagctcatggagcgcgtgcagaagctttactggcatcctttgagcaggtggaaaaaaccgatgactaaggaaaaggaagtgacagtagaaattcggcaagctgaaagtgcagacgcggctcttgtcgttgatttcttaaatcaagttgggaaagagtcagattacatgacgctagatgaagctggaattggcatgtctccagcagacatggagcaatttctaatggtgcaagaaatggcggaaaatcggatttgcctcttgctatttctagatcaggaactggcagctttgttaaatatcactgcagcttctcaacggtctgttcggcatattggtgatgtctttattgtggttcgaaaaacttattggaatcaaggacttggacagatcttgttggaagaaggaattgagtgggcgcactcgacgggtgttcttaggaaactagtcttgaatgtccaagtgcgcaatgaacgagcagttcacctgtataaaaagttaggttttgagatcgaaggttgtcaagctcgtggagcttgttcagctgaaggagaattcttagatgtttaccttatggggaaactgatagattagagagagattctaaatggttaaaaaaattattttgatgtttttgagcttattgacggtaacagtgattgggattggggcctatggccttaccatcctaaaccaaacgactgggactctcagtaagacctataaaggctttggaaatgagaccaatgtcattgcagaaaacaagccgatgactatccttttgatgggggttgatacaggtagcggttctcgggaagatccttgggccggcaatagtgataccatgattttggtgactgtcaatcctcaaacaaaagaaacaaccatgacgagtttggaaagagatatcctaaccaatattacttcagatggcgaaacggtccaagcaaaattgaattcggcttatgctcaaggtggtgccaagttagccattaagaccattcaagatcttttgaatatccatattgaccgctatgtcatgatcaatatgaagggattggttcaattagtggataaggttggtggtatcacggttaacaatccatttgacttcgatatctcgatcgaggaaaatgagccagaatatacggctaagatcgcaccaggacgtcaggagattaatggggaccaagctctcgtttattcacgcatgcgctaccaagacccagaaggagactatggacgtcaaaaacgccaacgtgaagtgatcaaaaagattgttgagaaagttttaagcctcaatagtttgagtcactacaaaggaatcattgagtctgttagtgacaatatgcaaaccaacatagcgcttgacagtaatagtcttcttcaattgctagggtataaagacgccctttcaacgattcatcagtaccagttgaaaggagaagatgccaccttagcagatggcggaagttatcagattgtcacttcaaaacatctcttgaaaattcaaaatatcatccgcaaagctttgggactaaaagaaatcaaaacattgaaaaccaatgcttacctattagatggagatgaagatttgaagtcttcttcttctcaaactgaaaatccagttccagcatctggggaagcacctgtttaccaagagtttaaccaactaccagttgtaccatcgacccaggatacgggagtggtgacgcctcaaagttctgttgcaccagtgacaccagttgctcctgcagctacagagtcgagcagtgtgacacctacggtgccttcagaataagaaaaaaacgattgagttttctcaatcgtttttacttggttgccagatgtcttgaatttcttttagagaagctgttgcttgttgactaaatagtttggtcttgtattggaaatccgttaccaattcttgaagattggtcttttggtcttggataatatccagattgcgttggatttttgctaggttatcttgaattcccttgaccaattggctggattcagtcacctctgttttaatttctttgcggttttttactaggtggtagctaatgctagctcctgttgcaaaccaaaagagatttttgagtttcatatggcctcctttttaactgtttttgatggtttctgcgagaactgctagttgttcaaaattaggctcgtgttcagtaaatgaaatggcaagctcatcttgatcggaatagcgagggataatgtggacatgtgtgtgaaatacggtttgtccagaaacttcttccatgttgctgatgatattcattcccttagcttgggtagcagcttctacttttttagcaactttagaaacacgtgcaaatagttgagctgtggcggtttcgtccatctctaagaggttgcgagcgtgtttttttggaaccactaacgtatgacctggtgtaacctgagagatgtccaaaaatgcgaggacttcctcgtcctcatagactttggaggaaggaatgtcgccagctataatcttacaaaaaatacaatcatcaaccataaatacacctcatttagactaaattttgttataatataagaacattataccagaaatcggagaaaatatgttagaaatcaacaagttgacagggggctatgtcaacatccctgtcctgaaagaggtgagtttttcagttccggatggccaactgattggtttgattggacttaatggagctgggaagtcaaccacgattaatgaaattattggtctcctgcatccttatgctggggaagtacggattgacggcttgagtcttccagaagctccaacagactatcgtaaaaaaatcggctatattccagaaacccctagcctatatgaagaattaaccttgagagagcatatcgaaaccgtagctatggcctatgatttagacatggatcaggtcatggtgcgcgtccagcctttgttggaacgatttcgtttggctgaaaaattagattggttcccgacccagttttcaaaagggatgaagcaaaaggtcatgattatttgcgcctatgcagtggatccaagtctttatattgtcgatgaaccctttttgggattggatcctgttgcgattgcagatttgattcagttattggcagatgagaaagcaaaaggaaaatcgattttgatgagtacccacgttctggattcggctgaaaagatgtgtgatggttttgtgatcctccataagggtcaggtccgagcaaaagggaccttggacgagctgcgttcaacttttggggatgagaaagcaagtctaaatgatatctacatgaccttgacagaagaggaaacagcatgaaagagttgatgaaaaaacggcaagaaacgtttcgaactcaatgtgtaaaatatagccgctatgttctcaatgatcatttcgttctctttatgttgattttcataggatttttggcggttcaatacagccaattcttgcaagatctacccaaagatacaagcctgatccgctggagtctcatgattggcttgctcctcttggttccgattggctccattgcgacctacttagagaagcccgatgctttattccttttggtaaaggaagaggaagtgaaacgttatgtcaaagggcaggccaagaagtcttttgtgttttggtttttgattcaaagttttgtccttctattatttgtgcctcttcttctggcaacagggctggataaacttgctattgtagcttatatccttgtcttaggggtggctaaaggggctgtttttagctggaaggaagcgcgtttctaccaggatgaaaatttaaattggcccttggctattgctcgtgagaatgcaaggaaacaattgattcttcgcttctttgccttgtttacaacggtgaaaggtattactaacagtgtcaaaagaagagcgtacttggatggtttcttagggcttcttcccaaaacacatggcaatacgtggctgcacttatatatgcgctccttcctacggaatggagatcttttctctatgactctacgactcttggctctttccattctcgctatcatctttattccccagcctctcgtagtgattgcccttgtagccttgctcaattacttggttatttttcaattactggggctttacagtgcttttgattaccaacccttgaccctccttttcccgatgaaaaagggcagtaaaaaggcagggttgaacaaaacgattcagctggtcatggggatgataacggtgatagaaggaggaattggcctggtctttatttcagataaagtcctgttgttaggcctactggcttatacagttgctttaatcctactctatcttccatttaagatggcgcgcttggttgacgaaagtcgttaaaattagtaaaatagattggaaactttttacggaggaaaagatggactcgaatgaaaaagagctaagcctcaccccaattcctgggaagagtgggaaggcctacatggggacctacccagatggtgggcgcgtttttgtaaaaatgaatacgaccccaatccttgcgggtctagcaaaagaacagattgctcctcaattgttatggagtcgacgcttgccagatggaaatgtgatgagtgcccaagaatggttgaatggggaaattctcacgccaaatgggatgtcgaaaaaacaagtcgtcaatattttaacgagattgcaccgttctagacctttgatgactcaattaaaaaaacttggctatcctgtggaatctccattagaattgctcaattcttggagtaaccggttgccaattgccctacgtcagaaccactatatccaatcagtcgtaaagaatttacgtaagacagtgcctgcctttcgggaggattatgcgacgatcgtccacggagatgttcgtcatagtaactggattgagacagagagcggcttgatttatctagtcgattgggactctgttcgtttgacagaccggatgttggatgtggcgcatatcttgagtcactatatcccagattctaattggcgcgattggttaggctattatggctacaagtacaatcaaaaagtatttgataaactctattggtttggtcaatactctttcttgtgccaaattgctaaatactatgaaaataatgatttagaaaatgtcaatcgcgagatctatgctctgcgcaatttccggttgaaatatggaaaggaaatatgagagttagaaatcgcaagggagcgactgaattattagaagcgaatccgcaatatgtggtcctaaatccagaagatgccaagggaaagtggcatgaaatttttgggaatgaccatcctattcatatcgaagtgggcagcgggaaaggggcctttattactgggatggccaaggccaatccagagatcaactacatcggaattgatattcaaaaatcggtcttgagttatgctttagataaggtcttagaagctgatgttcctaacattaaattgctttgggtagacggagatagcttgaccaactattttgaagatggggaaattgatcaactctatctgaatttttcagatccttggcctaagaaacgtcatgagaagcgtcgcttgacttacaagaccttcttggataccttcaagcaaattcttccagaacatggggagattcactttaaaacagataatcgtggattgtttgaatatagcttggtgagtttttcgcaatacggtatgatcttgaaaggggtttggttagaccttcatgccagtgattttgagggcaatgtcatgacggaatatgagaagaagttctcaagtaaaggccaggtcatttaccgtgtagaagcacagttttagcatattccttgcaattattgtggaatcgtgttataataacttaaatgaatagaaaaggagaggcggggaaatatcttcgcctcttatctatgaggaggtggcaaccatcgcaacaattgttgacttagtaacagaagtgattcagccagctataaaggaaccatttgaattggtcgatgttgaatatggcaaaatgggtggtgactacgtcttaagcattttcgtagacaaaccagaaggaatcacactgaatgatacagcggatttgacagaaatcattagcccgctattggatcaaatcaaaccagacccatttccagaacagtacctcttagaggttaccagtcctggcctggagagaccattgaaaaccaaggaagcactcgagggagctgttggcaagtacgtcaatatcagcttgtacaaggctgttgaaaagcaaaaggtctttgaggggaatttggtaggttttgaagaggatgttttgaccattgagtatatggataaaacacggaagaaaacagtggatattccttataaccttgtgtccaaagcaaggttggctgtaaaattgtaacagaatgaaagaaaggatgcctttatagaagaggcaagaataacatgagtaaagaaatgctagaagccttccgcattttggaagaagacaaagggatcaaaaaagaagatatcatcgaagcagtcacagaatcattgcgttcagcttatcgccgtcgttatggacaatcagaaagtgcagcgattgaattcaatgaaaaaactggagatttccgtgtttatacggttcgtgaagtggtggatgaagtctttgatagccgtttagaaattagcttgaaggatgccttggccattagctctgcttatgagttgggggacaagatcaagtttgaagaagcgccagctgaatttggtcgtgtagcagctcaatctgccaaacaaaccatcatggaaaaaatgcgtaagcaaacgcgcaccatcacctataacacttataaagaacatgaaaatgaaatcatgagtggaacggtggagcgctttgacaatcgttttatctatgtcaatcttggctcaatcgaagctcaattgtctaagcaagaccaaattccaggagaagtgttccaatctcatgaccggattgaagtctttgtctacaaggtagaagataatccacgtggtgtcaatgtctttgttagccgaagccatcctgaaatgatcaaacgtttgatggaacaagaaattcctgaagtttatgatggaactgttgagattatgagtgtagcgcgtgaagctggagatcgtacaaaagttgcggttcgtagccataatccaaacgtagatgcgattgggactatcgttggtcgtggtggatcgaacattaaaaagattaccagcaagttccacccagctcgatacgatcaaaaattagaccgtatggttccgacagaagaaaacatcgatgtcatcgagtgggttccagatccagctgaatttatctacaatgcgatcgctcctgcagaagtggaccaagttatttttgatgatgaagatagcaaacatgctctcgttgtggttccagacaacaaattatctcttgctattggtcgtcgtggtcaaaacgttcgtttggcggctcatttgactggttaccgcatcgatatcaaatctgcaagtgagttcgaagaaatggaagcagctcaagaaacttttgaagaccaagtagaaagtggcgaagagcaagtagactaagtgagggagggaaaatggtaaaaacaagaaaaatccctttaagaaaatctgtcgtttcaaatgaaattattgataagcgcgatttgctccgcattgtcaaaaataaagaaggacaagtctttatcgatccaactggcaaggccaatggtcgaggtgcttacatcaagctagacaatgaagaagcggcacttgctaagaaaaagaaagtttttaatcgtagctttaatatggaagtggaagaagctttctatgatgaattgatcgcttatgtagatcataaggtgaagagaagagagttaggccttgaataagcaaaagataagtaatttgttgggcttggcgcaaagagcaggaaaactcatttctggagaagaactcgtgatcaaagcaatccaggaagaaaaagcaaaattagtttttctggcaaatgatgcagctagtaacctgacaaaaaaggtgacggataagggtcactattatgaggttcaagtatctaccgtgttttcaacactagaattaagcactgcaattggacgtgcccgtaaggtcgtcgctgttgtagatgctggattttcaaagaaaatgaggtctcttatggaatagaagaggaggacagcaattgtctaagaaaagattatacgaaattgccaaagaattgggcaaggaaagtaaggaagtcgtcactcgtgcgaaagaattaggttttgacgtcaagagtcatgcatctagtgtcgatactgatgttgctgaaaagttgatcaagagctttgcagcgaaaaaagaaacagtcgaaaagaaagtagcagaagtggctgccaagacaacggctgtcgcagcgaaaaaagaagcagcgcccgtcaaaaaagaaggagcaactgagacaaaatcagtaacgccagctgctaaaccaaagagtcgtaactttaaagcggaacgagaagcgcgtgcaaaagaacaggctgaacgtagaaaacaacaaggcaatcgtccaaaacgcgatcgcaaggacaatcagcgttatggtgacaaccgaaatcaacgaccacaagagcgaaatgaacaacgaaatcaaggttctgagcgtcgcaataaccgaccagatcaaagacgtagtgcacaaccccaagtagcaccaaaagttgatttcaaagcgcgtgcagcagcactgaaagctgaacaaaatgctgagtacgcacgtggaagtgaagatcgctacaaacaacaagctgcaaaagcagaacaagaacgtcaacagcgccggaaacgggtagaagcaccagaagtgaaagcacctgtacaggagccagctgttgagaaccatacaaaaccagctgttgctgctgctccagctcaagtcgatacacgtcggaagaaacaagcgcgaccagataagaaacgcgatgattttgatcgtgaagaagatggtccaagaaaacaacaaaggaatcgaaatagtcaaaatcaagtgagaaatcagagaaatagtaactggaataacaataagaaaaataaaaaaggaaagaacaaccgtaatgatgctccaaaaccagtaacagagcgtaaattccatgaattaccaagtgaatttgagtatacggatggaatgacggttgccgaaatcgcaaaacgcatcaagcgtgaaccggctgaaatcgtcaagaaactctttatgatgggagtcatggcgactcaaaaccaatcgctggatggagatacgattgaactcttgatggtggattatggaattgaagccaagaaaaaggttgaagtagacaatgccgatatcgaacgcttcttcgttgaagatggttatttgaatccagatgagttggtagagcgtccaccagttgtcaccatcatgggacacgttgaccacgggaagactacccttttggatacccttcgtaattcccgtgtagcaacaggtgaagcgggaggaatcacccagcacatcggtgcctaccaaatcgtggaaaatggtaagaagattaccttcttggatacacctggacacgcggcctttacttctatgcgggcgcgtggtgcatctgttaccgatattaccatcttggttgtagcagcagatgatggggtgatgccacagaccatcgaagccatcaaccactcaaaagctgccaatgtcccaatcattgtggctattaacaagattgataaaccaggtgccaacccagagcgtgtcatcggtgaattggcagagcatggggttatgtcaactgcttggggtggcgattctgagtttgtagaaatctcagctaagttcaaccaaaatatcgacgaactcttggaaacggtccttcttgtggctgaaatccaagaactcaaggcagatccaactgttcgtgccatcggtactgttatcgaagcgcgcttggataaaggaaaaggtgcggtggcaaccctccttgttcaacaaggtaccttgaatgttcaagacccaatcgttgtcggaaatacctttggacgtgtccgtgccatgaccaatgaccttggacgtcgtgtgaaggtggcaggaccatctactccggtttctatcactggtttgaacgaagcgccaatggcgggtgaccacttcgcggtttatgaagatgaaaaatcagcgcgtgcagcgggtgaagaacgtgccaaacgtgctctgatgaaacaacgtcaagcaaccaaccgcgtcagccttgaaaatctctttgataccttgaaggctggggaagtgaaatctgttaatgtcatcattaaagccgatgtacaaggttcggttgaagcccttgctgcctcccttcaaaagattgaagtggaaggtgtgaaagtgaccatcgttcactcagcagttggtgcgatcaacgaatcagacgtgacccttgcagaagcttcaaatgccttcatcatcggatttaacgtccgccctacgccacaagcacgtcagcaagcagaagctgatgaggtagaaatccgtcttcactcaattatctacaaagtgattgaagaaatggaagatgctatgaagggaatgttggatcctgagttcgaagagaaagtcatcggggaagcagttattcgtgaaacctttaaggtctctaaagtgggtaccatcggtggatttatggtcctcagtggtaaggttactcgtgattccaaagtccgtgtcattcgtgacggtgtcgtgatttatgacggtgctcttgcaagcttgaaacacttcaaagatgatgtcaaggagatcacaaatggtcgtgaaggtggattgatgattgaaggttacaatgatatcaagacagatgatactatcgaagcctacatcatggaagaaattaaaaaataagatgctgactaggaaaaaagagggttttcctctgatttcctagtttttaaacacagagcagaaaggagttcctatggcaagtcattttcggacagaccgagtagggatggaaattaagcgggaagtcaacgagattttacaaaagaaagtccgtgacccgcgtgttcaaggcgtcaccattacggatgttcaaatgctaggtgatttgtctatggccaaagtgtattattcaattatgagtgatttggcttcagacaatcaaaaggctcagacaggccttgaaaaagcaacaggaaccatcaagcgtgaattaggtcggaatctgaaattatacaagattccggatcttacttttgtcaaagacgagtctatcgaatacggtaacaagatcgatgagatgttacgcaatttgaacaaagactagagaggttggaaattttccacgcccagattgaaagacaaagtcttcttagaaactttccttaggtgagtacggacgtcagcgaacttcttcgaagttccatgactaattattgagcctaaggtctcaataattccgagtacctgaaactattaagtttcaggtacttttctcacgacgaaaagtttcagtagatgattgaatcactctaacgagtaacatttctttttatagaatttattagatttataaaaaagaatagtttgtctacagtctcgggttggaaattttccaccctctttttttggctcttaaaacgaggaaaataaaacagaaggaaaaaacggtttcaaaaaataatagaaatttacagaaatctcttgtgtgattggaaattatcctttacaataggagaggagttttatttctgatctcaaatttggaggaatgaacatgtcgattaactggcaggaaattgtatttaactttttgggagggctggggctctttctctatagtattaaaaccatgggagaaggcttgcaacaggctgcaggagatcgacttcgctactatattgataaatatacgagtaatccctttctaggggttctagtagggattgggatgactgccttgattcagtcgagttcaggggttacagtgattacggtcggtctggtgagtgcaggacttctaaccctccgtcaagctattggtattgttatgggggccaatattggaacgactattacctcctttatcattggttttaaattaggagactacgctcttcccatgctctttatcggagcggtttgtctcttctttaccaaaaatcgtttggttaataatgttggacgaatcgtttttggtgtcggtggtatcttctttgccctcaacttgatgagtggggctatggaacctcttaaagatttgcaagtctttcgtgactatatggtgcagttaagtaaaagtcctatcttgggtgtctttgttggatcaggcttaacacttttgattcaggcctcttctgcaaccattggtatcttgcaaaatctctatgctagtcatttgattgacctgaaaggagccctcccagttctctttggtgataatatcggaacgaccattacagctatcattgcttccttgggagctaatattgcggccaaacgtgtggcaggtgcccatgtagcctttaatgttatcggaaccattatctgtcttgtcttccttgttccgtttacctctttgattcaatggtttgaaacgactcttcatttatccccagaaatgaccatagcctttgctcacggaacctttaatataaccaataccatcatccagttcccattcattggagctttggcatactttgtgaccaagctgattcctggtgaggacgaggttgtcaaatatgaaccgctctacttggatgaaaatttgatcactcaagcaccttcgattgctcttggaaatgcaaaaaaagagttgcttcatttaggtggatatgcagacaaagcttttaatctttcttatgattatattgttcatcaaaatgagaaaacagctgaaaagggtcataagacagaagaagccatcaataccattgatgatgatttgactcgctacctgattcgtttgtcaagtgaagccttgagtccgagagaaagtgaagttctcaccaatatcttggattcttcacgggatttggagcggattggagatcacgcggaagccttgatcaatctgaccgattatttaattcgtaagaaagtggtcttttcagaagcggccttggctgaattggaagatatttacaaccaaacccatcaatttgtagaggatgccttaaaagctgttgagaacaatgatgtgagtcttgcaaaccaattggtagcacgtcacgaggcaattgaaaagttggagaaaagacttcggaaaacccatattcgtcgtttgaaccaaggcgaatgtacacctcaagccggagtaaactttattgatatcatttctcactatacacgtgttgcagaccatgccatgaatctcgctgaaaaagtacaaatcgagcaaatttaaggaacgtcaaacagagtaagtaggaagcttactctgttttttgttggattctattcaaaaataggtctagaccatttacaaatggaagtgaaagcgttataatatgtatgaatataaatggaacacagttcctacaatggaaaggacaagactatgtctacatatattaaagcagatcaattttattatccacatggggttcgccgcggaggctatttggagcttgttgatggcaagtttggaaaacatgtggaaagcttaccagaaggtgcggatgtgctggattattctggttacagcattgcgcctggcctcgtagatacccatattcacggatttggtggggtagatgtgatggataataatatcgaaggcactctccataccatgagtgaagggctcttgagtacaggggttacgagctttttgcctacgacccttacttcctcttacgaacaacttttggcagtaacggaaaatatcggtgcacgatacaaagaagcaacaggagctaagattcgcgggatttattttgaaggaccttattttacagaaaaatacaagggagctcaaaacccatcttatatgaaggatccaagtatggaagaattccgggcttggcaaaaagctgccaatggtctgttgaataagattgcccttgctcctgagcgtgaaggtgtagaagactttgttcggaccattacaggagaaggggtgactgttgctttgggacactccaatgctacttttgaagaagctaaaaaagcggtagatgcaggtgcgagtgtctgggtgcatgcctacaatggtatgcgtggtttgacgcaccgtgaactcggtatggttggtgctatgtatgagttgcctcatactacagcagagttgatctgtgatggccatcacgttgatccgctagcgtgtgatatcctgatgaaacaaaaaggaaaagaaaatgttgccttgattacggactgtatgacagctgggggcttagaagacggggactacatgcttggggaattcccggttgtggtcgctgaagggacggctcgcttgaaatcaactggtaatctagctggctcaatcttgaaattgaaagatggattaaaaaatgttgtagagtgggggattgctaacccttacgaagcagtgatgatggccagcctcaatccggcaaaatcagtccatattgatgatgtttgtggtcaaattcgagaaggatatgacgcggacttcatcgtgcttgatcaaaatttggatctggttgcgacctatctcgatggggtcaaacgttaccaagctaccaattagattcaagaatcgaagatagaatacttcctctctaagtcatacctagagaggtttttgtgacgtattcaaggggttaaacagtctgtaggggctttttgtttaccgatggtagtgcaattttgtgaatgctgtcttttcatgctataatgggaattgaaatgtgaggtagcttatgaaggcaattgatatacgttttttattgatgggaatttttttcttgctctatgggattgtaagaaaaaatatctttattgtgattgttggtggggcatttttactctatagtttttatagcaagaagatggagccaaccaagaagaatatttttaagccagagctcaagcttcgagggcctaagaaaccgaaatcgaagaaaggaaagaagaaatgaatcattatcgtttaaataatggggtggagattcctgtattgggatttgggacatggaaagcagcgaatggagaagaagcctatcaagctgtcttagctgctttaaaagcaggttatcgccatatcgatacagctgcgatttatcaaaatgaagagagtgtgggtcgggccattaaagacagtggtcttgcgcgtgaagacctgtttattaccaccaaactttggaatactcaccacacttatgaagacgctcaagctgctttggaagagtctcttgaaaaactaggcttggactatgtagatctttatttgattcattggccaaatccaaaacctcttcgagacaatgatgcttggaaacaacgaaatgctgaggtttggcgggcaatggaagatatgctagctgctggcaaggttcgagctattggtattagcaattttctgcctcatcatttggaagccctccttgaaacagctcgggtcattccggctgtgaaccaaattcgtctagcacctggggtttaccaaagcgaagccatcgcagcgagtcgcaagcatggcattttactagaggcttggggaccttttggccaaggagaattgttccaaaatgaacaagtaaaagaaatggctactaaatatggaaagaccgtctctcaactagccctggcttggagtttacaagaaggtttccttccattgcccaaatcggttacgcctgagcggattgcgagtaatttaaattgctttgattttgaattgacgggagaggatatggaactccttcgccatcttccggttgaagcaggtgcaccagatccggacaccaaagatttttaagagagaatatctattcattaatgaaaaccgaggacagtttcgttctcggtttttaaaatcctttcaatgattaaataattttaaaactccaacaaaaacagatgttctataatactttcccattctaatttacaattttccgaacgaaaataaattaatagctagtaatattcgtgaatgttacatttgtgttacaatttgttttttgaatgaattttcagataattttgcgttataatagttactattaaaataaaaggggagtttctatgaatagacaagaacgtttttcattaagaaaatacaaatttggtgtagcctcagttttattaggggctgttttggtatttggatctgcacaagcgagtgcagaagaacaagcggccagccaaacgagtgctggaacacagcttgtagccactactcaacaggcacctgctgaagaagagcattcacaagcaacagaagcaagtacagcagttgctagtgagaaagtagaagttgcaaaagaagtaacagttgctgaaaagacaacgaatacaacagaagcagctcttattgaaaaaacagaagctccgaaagaagcagctgctgttccagaaacaaaaccggaagtagcagaaaaacctgtagaaaaagcaacagaagtggcttctgcgacaagttcagaaacaacgaatcgccatgaggcagctgaaaaacctcaaagcatcgaaagtgacgaaattattactgttccccaaacctggaagcaaggctataaaggggaagggatggttgttgccgttatcgactctggcttggatgtgaaccacgaggttcttcggattaccgatccttcaaaagctaagtttaaaaaccaagaagaaatcgaagctgctaagaaagcggcaggaattgattatggtaaatggtacaacgacaaggttgtctacgcttatgactactttgatggtaccgacaatatcaaagaggccgaaagagattctcacgggatgcacgttacagggattgcaacagggaatcctgataaagaagcaggaaacggtgaaaagatctatggtgtagcaccagaagcgcaagttatgtttatgcgtgtcttttcagatcgtcaaaaaacaacaggatctgctctttatgtaaaagcaattgatgatgctgtagctcttggtgcagatactatcaacatgagtcttggctctacgactggttctacggtcaatgcggattcagatattgtagatgccattaaacgagcgcgcgctaaaggcgtatctgtcttaatttctgcaggaaatagcaatacttttgggaatggttattctagaccagcagcagaaaatccagattacggtttggttggaaatccatcaacggtagaggactctatctctgttgcttctatcaataacaacatcattacaacagaagtttttgaagtcaaaggtttggaaggcaatgcagaagcggataacggaaaatttgattacagtaaatctgctgcagatgctgattttgaaaaaggcaaagagtacgaatatgtatcagttggtcttgggaaagaagatgattttaaagatctagaccttaccggtaaattggccttaatccaacgtggggaaattccattctcagaaaagattgccaatgccttccatcatggtgcagcaggagctttggtctacaataatgtggaaggatctaatcttggaatggcaattgatggagatgctaagaaaattccatctgtcttcatttcaaaacgctatggggaagctcttaaagctggatcttacaaagttgtctttaacaataccatggctaaccgtccatctccagaagcagaccaattgtctgatttctcaagctggggagtgacaaccgatggtcagttgaaaccagatgtcacagcacctggtgggaatatcttttcttctttaaatgacaatacctacggggatatgagtggtacaagtatggcctctcctcacgtagcaggtgtggcagccttggttaaagaataccttgtgaagaaccatccagaattgactccagaacaagtttctgcaactgtgaaagccttgattatgtctacagctaaaccacatgttgacaaagaaactggtgtctatacttctccacgtcaacaaggtgcaggggttgtcgatacagccgcagccgtttcaacagacttgtatgtgactggtgaaaacaactatccaagcgtcactcttggtaatgttggagatagctttacctttgatgtcacagtccacaatatttcagataccgatcgtaccttgaaaatgttggtcaatacagacacagatgaagtaaaagatggtaaatttacccttcgtccacgtaaattgactgaaacagcttggcctgaagtaactgtgaaagctcatagctctgaaacggttacagtgaaagtcgatacaagtaaattcacagaagagttgagcaaagaaatgccgaacggctatttccttgaaggatttgttcgctttgtagatccggcagatgatggggatgtggtcagcttgccgtttatgggattcaagggagaattccaaaaccttccagctgttgaaaaaccaatctatgatttggttcgcgaaggaaaagatggcttctactatcatgttccaaaagatttgaatatctcctctagtgccaatgtttctgcgcttgttacccttcaaaatgatcttctcctcacacaaggaaaacgagatggtcgtcggatgacagttcttggtattgaagaaaatgcggaaggtacacattctcttcaattagatgaaaatggaaatgttcgcatcgctatttcgccaaatgaagatgggaataaagacctcgttgaatacaagacagttgcccttagaaacattgaaaaccttcgtgcaacggtctacgcagcaagcgatacggaacataaaaatccattgtgggaaggaactccatctgaccatcgtaagaacttcttcaacggtgaccaaaagaacccacgcagttacacactagataacactgcttggaatggtattgatgcgaatgggaaagcagtagcagatggtctatatgattatgtcattcgttatacaccaatggttcctggtgctgaagagcaatcaacgacctttaaggttcaagttgatacccaaaaaccagcgatcacatctggatatattcgctttaaagatggggcacaacagtttgtagctcgtaaagccaaagatgttggcgatggtggtatcttaactgaaaaactcgtctacgtgactccattcgatgataagggaacaatggtccaaactagtgaagataagaacgggacacgtgcgcttgaaaattaccatgtgatcaaggccaatgcagatggtagcttcgatcttcctgaaaacatcgataagaagaatatctactactatgtagaagactttgcggggaacgtagattatgtttcactagctgatttagttcgggatcaaaatagtggtcgggttcaaattgcagttcgtgacgctaaaacgaacaaagatttggatactatgtatgtttaccgaatcaaagatagcaatggccaatacgtatcagttgataagacaaaagatattaacttcttgaactttggtcattatactgcagaaatctttacatatgatcgtacagaagtgaaatttgtcagcagcttgacacaagaatttgatttaacagaagataatagtttccaaacgatcgcttttcttgccaatactttagaatatgcaccagttagcatcagctttgatcaaccggtttcaaaagcagctacgatcgtattgaaaggggcagatggtgaaaactttgtcttgcctgctgaaaaatatggtaaaaatggctttggtaaatctgtagcaactggtcaatataccttggttgcaactcttcctacaggttatgaactagctgaggaagcaccagtgatctcagttgtcgcagggcgtaacaataattatcgtattggagtgatctcaaaagtggatctcttagccgctttgaacaaccaagcagatgttacaaagacagcgcaatacttcaatgccagtgcggataagaaggaagcctatgatcaagccttccaagctgcccaagcagccttgaccaacaaggttagtcaagagcaagtcaaccaagctctagctagtcttgaagctgccagccaagctttgaatgggaaagattcaaacgttgcggccttgaaagaagcgatgcaggcttacgatgctacgactaaaactggtcgttatgccaatgccaaagaaaaagtacgtcgcgactacgatcgtgctttccaaacagttgccttgcttgcagttgatccaactgtgaaacaagaacaaatcaatcaagcacttgctgagcttagccgtgcagaaggaaaattaaacgggaaagcaactgatttttcaagtcttgaaaaatacatcaaggaagaattgaagttccaagaaaagaatgctaaattcatctatgctggaaatgaagaaaaagaagcttacctagtagccttcaaggatgcacaaactatcctttcaaatccaggagcaagccaacaagatgtgaaagatgctttgacagccttgaagaatgccaagaaaaaacttcatggtaaaaaaccaaaagctgcaagacgtccataagaaaaacaacattgtttgttagcctaaaatccgtatgaaacgattgtttcatgcggattttaatttacaagtcactaaaaatctgctataatactagtcaagaaagaagggcttatggcgtttttctagcgagcttgggatagtgagagccaagtagagcaaagtaagcaagtggcgctttctctcagtaaaaagctgagtaaagtaagataaaatgaagtaataaattagggtggaaccgcgtttctgacgcccctaggtcacagacttaggagcgaagacacggttctttttgtatcctgagtcacaagaaactttatgaaaaaggagtatgcaatgtctaaaaaactaacctttcactgcgttagtggcagagacctccatacagtcggactgccccacgctcagcactagggtgcctgagctaaacgcagtactaactcgtcttgcctcgtatgatcgacgaggcagactcgtgtcgcaagaaatcatttaaatcaaggagtatttaatgtctaagaaattaacatttcaagaaattattttgactttgcaacaatactggaatgaccagggttgtatgctgatgcaggcttatgataatgaaaaaggtgcgggaacaatgagtccatatactttcctccgtgccattggtcctgagccatggaatgcggcttatgtagagccatctcgtcgtccagcggacggtcgttacggggaaaacccaaaccgtctttaccaacaccaccaattccaagtggtcatgaaaccatcaccatcaaacatccaagaactctaccttgagtcattggaaaaattggggatcaatcctttggagcacgatatccgtttcgttgaagataactgggaaaacccatcgactggttcagctggtctaggttgggaagtttggcttgacggtatggaaatcactcagttcacctacttccaacaagttggtggattggcaactggtccggtaacttctgaggtcacttacggattggaacgtttggcttcttacatccaagaagtcgattctgtttacgatattgagtgggctccaggcgttaaatacggagaaatcttccttcaaccagaatatgaacactcaaaatacagctttgaagtttctgaccaagatatgcttcttgaaaacttcgaaaaatttgaaaaagaagcaggacgtgctttggaattgggccttgttcacccagcctatgactacgttttgaaatgttcacacaccttcaacttgcttgatgcacgtggagctgtatccgttacagaacgtgccggctatattgcccgcatccgtaacttggctcgtgtcgtagccaaaaccttcgtcgcagaacgtaaaaaacttggttacccacttctcgacgaagccacacgcgccaaactcctagcagaagaggaagaataaagagagcgtattagatgggattgactgatagagcaatcctacagaaccagttgccgcagtgataaaggtatcgttagagaaactaatgataccaggcaaaattggagaccttaggctccaattttagcaatgaaacgacgaagtcggttgctgcgtgccaatcacataaggcaaactggaaaaaaaagatatttttcggagaaaaaacatgacaaaaaacttattagtagaacttggacttgaagagttaccagcctacgttgtcacaccaagtgaaaaacaactcggtgaaaaaatggcagccttcttggatgacaaccgactttcatacgaagacattcaaaccttctcaacaccacgccgtttggctgtccgtgtgattggtttagcagatcaacaatcggatttgactgaagattttaaaggaccttctaagaaaatcgccttggatgcagatggaaacttctcaaaagcggctcaaggattcgtccgtggaaaaggcttgaccgttgatgatatcgaattccgtgaagtcaaaggggaagagtacgtttatgtcacgaaacacgaagctggaaaaccagccaaagaagtcttggctggccttccagaagtgcttgcttcattgaccttccctgttagcatgcactgggctaacaatacatttgaatacatccgcccagttcacaccttgatcgttcttttgggcgacgaagcgctcgaccttgatttcttggatatccagtcaggtcgtgtgagccgtggacaccgtttccttggacatgaagtggaaatcaccaatgcggattcttatgaagaagaccttcgtaccgtttacgtgattgcggatagcaaagaacgtgaaaacatgattcgtgagcaaatcaaagccatcgaagcagaacaaggtgttcaagttcaaatcgaagaaggccttttgaatgaagtcttgaacttggtcgaatacccaactgcctttatgggaagttttgatactaagtatttggatgttccagaagaagttttggtgacctcaatggaaacgcaccaacgttactttgttgtacgtgaccttgatggtcagctcaaaccaaacttcatctccgtccgtaatgggaacgctgagcacttggaaaatgttatccgaggaaatgaaaaagtcttggtggcacgtcttgaagacggtgaattcttctggcgtgaagaccaaaaacttaagattgaagacctcgttgctaaattggcgaacgtaaccttccatgaaaaaattggttctctttcagaacacatggctcgtgcgggtgtcattgcagcggcactagctgagcaagctggtttgactgctgaagaaacggcagctgtcgctcgtgcagctgaaatctacaaatttgacctcttgacgggtatggtcggagagttcgatgaattgcaaggaatcatgggtgaaaaatacgcccttctcactggtgaagatgctgcggtagcgacagctatccgtgagcactaccttcctgattcagcagacggagcccttccagagactaaggttggtgccatccttgcccttgcagataaattggataccctcctttccttcttctcagtaggcttgattccatcaggttccaatgacccttatgcgcttcgtcgtgcaacacaagggattgtccgtatcttggatgcctttggctggcatatccctatggatgagttgattgacagcctttacgctctttcatttgatagcctttcttatgataatcaagcagaagtgctcaacttcatcaaggcgcgtgtggacaagatgatgggacgcacagcaaaagatatcaaagacgctgttcttgctggttcaaactttgtcgtggcagatatgttggaagtagctgacgctctctcagaagctacgaagacggatggttacaaggcagctgttgaatccctctcacgtgctttcaacttggcagataaagcagatgcttcagtagcggtcgatgccagtctctttgaaaatgatcaagaaaaagctcttgctaaagcaattgaagagcttgaattgactggtgcagctagtgacaaattgactcaactctttgctcttagcccagtcattgatgccttctttgacaatactatggtgatggcagaagatgaggcggttaaaaacaaccgtttggcccttcttgcaggccttgtagcgaaagctaacgctgttgcagccttcaaccaattgaacacaaaataagtacctgatgacaggtagaaagtaggttttattatgacacctgaaaaaatcgctcggatcaatgagcttgctaaaaagaaaaaaacagaaggtttgactcctgaagaagcagtggaacaagcaaaactacgtgaagaatacattgaaggttatcgtcgttcggttcgtcaccacatcgaagggatcaaaattgtggatgaagaaggtaacgatgtaacacctgagaaactacgccaagtgcaacgtgaaaaaggtttgcatggccgtagtctcgatgaccctaattcataagcaaaagagtgctggaagagatttcagcactctttttaatctataaaattcagaatattctggactggattgaccaatttttaaaaacatggtatagtagattgtatgaaaatttgaagtatacttttctgaaaatgtacagaaaaagaattggagtaattatatgtcaaaaaaacatcatactggtgaagaaaccgaaaatgggatggttcgtggtctgcaaaatcggcatgttcagctgatcgctattgcaggaaccatcgggacaggactctttcttggagccggtcgttccctttctttgacagggccctctattattttagtctatatgctgactggcgccttcatgtacttgatgatgcgggcaatcggagaaatgctctatatggaccctgatcaacacacctttatcaattttatcaccaagtatataggaaaaggttggggttatttttcaggatggtcctattgggtctccttggtatttttgggaatggcagagatcaccgctgtttccaactatgtccagctttggtttccaaattggccagcctggcagattcaaattatctttttagcgctcttaagttgtgtaaacttgatcgctgtgaaggtttttggagaggttgaattctggtttggaatgatcaagattgtcactattttagccttgatcgcaacagggatctttatggtgacgacgaactttgaaacaccagctggacacgctagcttaaccaatattaccaatggttttcaaatgtttccaaatggttgggtcaagttcgtcatggccttccaaatggtcttctttgcttatcaagcgatcgagtttgttggaatcactacttctgaaacagctaatccccgccaagtattgccaaaagctattaaagaaattccaatccgaattgtgattttttatgtaggggctttgttggcgattatggctattttcccttggcaacagcttcctgtcaataaatcaccgtttgtaacagtctttcagatggtaggaatcaagtgggcagcaggattgattaattttgtcgtactgacagctgctgcatcttccttgaattccaccctctattcaacagggcgtcacttgtaccagattgcaaaagaaacaccaaacagcaaagtgatgaatcgtttgaaactgaatagcttatctcgtatggggattccaagtcgcgcgattattttttctgcgattgtggttgctgtttcagcctttatcaatgtcttgccaggtgtctcagatgcctttgccttgattacggcatcttcttctggtgtctacattgctatttacattttgactatgcttgcccatcttaagtaccgtaaatcgaaagaatttatgccagatggttttgtcatgccagcctataaagtgttgaatccattaaccattgttttcttcctctttgtattcgtttgtctcttcttgcaagaatcaacatacattggagcgattggagcaaccatctggatcattctttttgggatttacagcaattggaaacataatcaataaaccgcaagagagtgggacagaaatcggtaattcgttagaattcgatttcgtcgtcccacctccgcacagttgagtagggctgtaaaagctgatgaaatcagcgtagtagagcccactcaaccactgcgtcttgctcgacaatccaaaaataattgagaggctaggacttttgtcccagcctctttattatttcagagctagtttcctttttataagaaatttcttgggggattagaaaaaaacagagatggaagaaattatttttcttccatctctgttttttgtttttgaatggtttttttgagccaccaaagtgagccaactaggatcagggcagcaagccaaaaaatccaagcttcaatagtggttagaaaaaagtagagagcgatagcatcgaccaataaaagtgggatgagaatctgttttcttattttcataagaatattgtatcataaatcctagaggaaacaagtgaaatcaagcctttctaggtattttgtaggttccgaaaaggtccgataggattagttagtgaattttctttcaggagtgcatcttggtcccatttgtggtaaaatagtaaagatatgagtaaagaatttcatcatgtaacggttttgcttcatgaaacgatcgatatgctggatgttaagccagatgggatctatgtagacgccacattgggtggggcaggccacagcgaatatttgttaacaaaattaaatgaatcgggccatctttatgcctttgaccaagatcagcatgcaattgagaatgctaagattcgtttagctccattcatcgagaaaggcatggtgaccttcattaaggataactttcgtcatttgaaggaacgtctaaacgaattgggtgtgactgaaattgatggaatctgttatgacctaggtgtctctagtcctcagttagatgaacgggaacgcggattttcttacaagaaagatgcgccactggacatgcggatgaatcaagaagcttccttgacagcctatgaggtcgtaaatagctacgattaccatgatctagtccgtatttttttcaaatatggagaggacaaattttccaagcaaattgcgcggaaaattgagcaggcacgagcaattaaaccgattgaaacaacgactgaattagcagagattattaaatctgctaaaccagctaaggagctcaagaaaaagggtcatcctgctaaacagattttccaagctattcgtattgaagtcaatgatgaattgggagcagcagatgaatcgattcagcaagccatggatttgttggccctcgatggtcgtatttctgtgattacctttcattcgttagaggatcgattgaccaaacaattgtttaaagaagcttcgacggttgaggttccaaaggggcttccctttattccagatgatttgaaaccaaagatggagttagtcaaccggaaacctattttgccaagtgaagaagagcttgaggaaaataatcgatctcattcagcaaaattacgggttgctcgaaaaatacacaagtaagaggaattgatatggcagcaagatatgagagaacaagaacacaggtattgcaagaccactttcgccgtttctctagagtagaaaaggctttttatgggtcgattgtcctaacagctgtgattttagccattagtattgtctttatgcagacacggattttacaagttcaaagtgaactgactgatttgaatacggaactagaagccaaaaagacggaattggcagatgttcgtcaagaggtcaatgaattaacacgttatgaccgcttatcacagttggctagctcccaaggaatgaagctgcaaaaagaaaatcgaaaaacagtgagtgcaagtagtgatgaataaattcaaaaaatttttgatcgggtattcgataaagaaacgtcgcttgccggatcagaatcgaaaacaagttgggaaaaatctcagtgtactggcgattttcctcttttttctctttctgattaattttgcaatgatcattgggactgacaaaaaatttggtgtgaccttatcggatcaagccaagaaagtccatgagcagacggtcattgttcctgcaaaacgtggaacgatctatgatcgaaatggagcagtaattgctgaagatgcgacgacctataatgtttatgccattattgataaaaagtacaaatcagcaaccgggaaaatcctctatgtagaagagagccaatttaaaaaagtagcagaaatctttaagcagtacttagggatggatgaggattacgtcattcaacagttgtcgcaaaagaaattgaaacaggtttcttttggctcgaacggaaacggcataacttatagcaatatgacggccatccgtgaggccatggaagcggcgaagattgaaggggttgcttttacaaccagtccaaatcgaagctataaaaatggagtttttgcttctcaatttataggtcaggcctctcttcaagaagataaagaggggaataaaactctgaaggggcaatcagggatggagaaatccctcgatcgtattctcgctggtcaaaatggggttatcacctatgacaaagaccgaaacggcaatatcgttcctggttcagataaggtttctgtcaaaacagaagatggaaaagatgtctatacgaccatttcagcagaattacagacctaccttgagacacgtatggatgttttccaagaaaaagtaaaaggaaagtatgttagtgcgactcttgtgagtgcaaaaactggagagatcctagcgacaacgcaacgtccatcctataatgcggataccaaacaagggttggatctgaaaaacttgaaaacctggaataccatcctttatcaagatcaatatgaaccgggttcaaccatgaaggtcatgttattagcttcggcgattgatcatggaaccttcccagcctataatgaagtatactacagtaacgaactacaagtaaaagatgcgaccatccgtgactgggatgtcaatatgggactgtctgaaggtcgctatatgaatatcgcacaaggctttgcttactcaagtaacgtggggatgacccgcttggagcaaaagatgggaaatgctgtctggatggactacctaacccgctttaaattcggtcttccgacccgttttggaatgggaaatgaagcttacgggggtcttccaggggataactatgtcagtcaagccatgtcttcttttggtcaagggatttccgtcagtcaaactcaaatgttacgggcctttagtgccatcgctaatgatggacaaatgttggagccgaagtttattagtgctatttacgataaaaaatcagacacagcccgcaaatcaaaaaaagaagttgttggaaaaccagtttcaggatcagctgcacaacagacacggaactatatgatcaccgtcggaacagatccagagtatggaaccttgtacagtgatggacccatcattcaggtacccggtcaaaacgttgcggtgaaatcagggactgcccaaatggcgacagatcaaggatacttgcaaggagaaaatgattatatctactcggttgtagccatgacacctgcagaagatcctgaattcatcatgtatgtgacggtccaacaaccagaagtgaaattctcattcaccagctgggaagagctggtcaatcctattttggaagatgcagttgctttaaaagacgaattgcatctaacatcagaggcaccaactttggatgatgtgaccaaagaaacgacctacaaaatcccttcagtagaaactctctctaaggagttgaatctgaaacaaaatctgagcccaggtgcttattcagaggaattgcgtcgcaatttggtgcaaccaattgtcctaggaaccgggaaaaatatccgcaagatgtctgtggatgtaggctctaaagtcaaagccaatcagcaagtattgttattgacagaagactttgatgcggttccagatatgtacggttggactaagaaaaatgcagacatctttggagaatggactggaattgagattacctataaaggtagtggaaagaaagtaaccaaacaaagtgtcaaaatgaacacctcacttaataaaactaaaaagattacgttaacattaggagactaagatgtatattgctacgatccttgtatcgtttctattaacagtggctgctattccagcctttattcgattttaccatcgtgctcatatttctgggcaacaaatgcacgaagatgtgaaacaacacaaagcgaaagctggcactccgacaatgggtggagttgtatttctcattacagccgttctagttagttttgtcgttaccgtattgactggaaatttcacgcgccctgttcaactgattctatttatcttgattctttatggaattgttggatttttggatgactttttaaaagtttttcgtaagattaatgaaggtcttaacccaaaacaaaaattggcccttcaacttgttggtggaatcatcttctatattttttctgaacgccacggtgcaggaagccttttaaatgtctttggttacgatctttacttgggccatttctacattctctttgctttattttggttggttggtttttcaaacgcggtcaatttgacagatgggattgatggattagccagcatctccgttgccattagcctgagtgcctattcctttattgcctatatgcaagggaaatgggacattctctttgtgactttgagtatgattggggccttgcttggattctttgtcttcaaccacaagccggctaaaatctttatgggggatgtcggtagtctagctcttggagggatgcttgcagccttgtcaatggctctgcatgtcgagtggacgttgctcttgattggtctggtctatgtcattgaaacaggttcagtgatgctacaagtgacctatttcaaatggaccaagaaacgttacggggaaggacgtcggattttccgaatgactcctttccaccatcatttagaactgggtggcctttttggcaatgggcaaaactggtcagaatggaaagtggatgcctttatgtggaccattgccttggtgacaagtgtcgtgactctagttcttctctacctataaaacgacggtgggctttcccatcgtttttttactgactcagagagacttcgctggttaggaaaaatgactcataagagaggcaagaagacagcttttctgatataataatagagatcatgaaaggaactgagaaaatgaaatttacagagtttaattttaagccctatattcaagaggcactgaaagaaatcaattttagagaagcaaccgaagtacaggaaaaactaattccgattgtcctagatggaaatgatttggtaggagagtcaaagactggttctgggaaaacccatacgttcctcttgccgatttttcaaacgttaaatgaagacagtgagcaagttgaagcggtcatcacggctcctagtcgggagttggcgacgcaaatttaccaagctgctcgtcaaatcgctagtcattctgaaaaagagattcggattgtgaattatgttggaggaacggataaaagccgtcagattgaaaaactccaggtcaaacaaccacatatcgtgattggaactccaggccggatctacgatctagttgcatctggtgatctggctattcataaggcccatacttttgtggtagatgaggcggatatgacactggacatgggattcttgtcaaccgtggataagattgcttcaagacttccgcaacaactgcaatttttagttttttcagccaccattccgcagaaattacaacctttcttgaaaaaatatctctcaaacccagtcatggagcagattaagaccaagacggtgatttcagataccatcgataattggctggtttcgaccaagggtcgggataaaaatgagcaaatttaccaattgaccaagaccttgcaaccttatttggctatgattttcgttaataccaaaacgagagcagatgatctccatgcctatttagtggctcaaggattaaaagtggcgaagattcacggagatatcccaccacgtgaacggaaacggatcatgaatcaggttaaaaatcttgattttgagtatattgtggccacagatttggcggcgcgtggaattgatatcgaaggggtgagtcatgtcatcaacgatgccattccacaagatctttccttctttgttcaccgtgttggccggacaggacgcaatggtctaccaggtgtcgctattactctttatcaaccgagtgatgattcagatatccgtgaactagaaaaaatgggcattcgtttcgtaccgaaagtgttgaaaaatggggttattgaagatacttatgatcgggatagacgggccaatcgtgagaaaaagcaagagaaactcgacatcgaaatgattggtctggtgaagaagaaaaagaaaaaaatcaaaccaggctacaagaaaaaaattaaatgggcagttgatgaaaagcggagaaaagctaagcgagctgaaaaccgtgcgcgtggtcgggccgaacgaaaggccaaacgtcaaactttctaaccccttctttcaaatgttcagaagaaaacatagattttctttatgaactccataaagaaaaactattaggaacttgtctaaaattatgatagactaaatttgagtagtctatcatttttctatttctgtagcaatttttggaattccgatagtgaatgtgatagaatgtttatgttcgagaaaggaagtaacaaaaatgtttacaactaatcttttaactgccaactggtatgctgactttttaaaacacgttccagatagcaagctgtttagtttgagagccgtattggatgcatttccggcagtcattgggaaattgcctgtgacgattttattagccctaggaggcgcattttttgggattatttttgccatgatttttgctctggtcaaaattaatcgtgtacgaattctttacccgattcaagctgtttttgtcagttttttacgggggactcctttgttggttcagttgatgttgacctattatgggattcctcttattttaaaagcgatcaatcagtcctatggaacagcttttaatattaatgccattccagctgagttatttgcaattgttgctcttgcctttaatgaggcagcttatgcgagtgaaaccatccgggcagccattttatcagtggatcctggtgaaattgaggcagcgcgtagtcttgggatgaccaaccgtcaagtttatcgccggattattattcccaatgcagcagtcgttgcaactcctactttaatcaactctctcattggcttgaccaaggggacctcgctcgcctttagtgccagtgtggttgaaatttttgctcaagcacggattattggggggagcgatttgaagtactttgaacgctttatcacggtatcgattgtttactggattgtgaacattctcattgaaatactaggccgtcacattgaacgtcgactggatattgagactcccgtagcaattgatttaccagatcaggaggtccggatctaatgatttatatttcagaattatcaaagacattttcaggtcaaaaggttttaaataatctaagtttggaaattcaaaaaggggaagtcgtggccctaatcgggtcttcgggagctggtaaatcaaccttcttacgcagtttaaactatttggaagcaccagatagtggtagaattaagattgatgatttcgaagttgattttgagcacattagccaagatcaaatcttaaccttaagaagaaaattggccatggtgttccaacagtttaatttgtttggtagaaaaacagcccttgaaaatgtgaaagaagggctcattgttgtgaagggcttatccgatcaagaagcaacgaaaattgctcgagaagaactagcaaaagtcggtttatcggatcgtgaaaatcactatcctcgtcacctctcaggtggacaaaaacaacgggtggctttggcccgtgctttggccatgaaaccagaagttcttttgctggatgaaccgacttcagccttggatccagaattggttggagaagttgaaaaatccattgccaatgctgcaaaatcaggacaaaccatggtactggtcagccatgatatgtcttttgtagcgcaagtagcagataaggtcctatttttggataaaggacggattattgaatctggaacaccagaggaaatcatgcaacatccaaaagaagaacggacaaaagaattctttgctagttacaaacggacctatgtttgatataatagaggagaggtaagactcagctggcgatgctagctgggtttgttttctgaaaatgtaaaaatatttggagtcgtgatgttaaataaattattgtccttatatttacaaagtttagtgacgacaacgattttagttgggatcgcttcttgtatttggattggctaccgtgcccttaagaagaaagataaaacagccaagcaacgacaagcccatttgtatgatatcctcttaattgatatcatgacgattcctattttaacctttgcggtcatagggattttgtttatctttcaagcacgataattgcaaaaagaccgtgttagaattataatggttacaacaaaacagaaagaggttgagtatgtttgatacagtgattattggagcaggtcctgcagggatgactgctgccctttatgcagcacgaagcaatttaaaggtcgcattgattgagagaggaattccaggcggtcaaatgaacaatacgtctgacattgaaaactatcctggctatgcgaatattagtggtccagacttggctgaaaaaatgttcgagcctttagagaatcttggtgtagaacatttgtttggacaggtagagcgcatcgaagaccacggagcaaccaaaaagattgtcacagatgacggagaatttgaagctaaaactattgtgattgcaacaggttccaaccaccgtttattaaatgtccctggtgaagaggagctgaatagtagaggggtttcctactgtgctgtttgtgatggagctttctttagagacgaggatctcttggtcgttggtggaggcgattctgcggtagaagaagctgtttttttgactcagtttgcaaaaacagtgaccattgcccatcgtcgtgatcaattgcgtgctcaaaaagttcttcaagatcgtgcctttgccaatgataaaattcactttgcttggaatacagttgttgaagaaattaagggtgaacaaaaagtaacgtctgtccttttaaaagatgtgaagacaggagaggttagagagcaagccttcggtggtgtctttatctatgtcggtttagatcctgtcagtgaatttgcgacagaacttggtattttagatgaaaatggctgggtggtcacggatgatcatatgagaaccacagtcccaggtatttttgcggttggcgatgttcgtcaaaaagatttgcgtcaagtgacgacagccgtcggagacggtgcgattgctggccaagaagtttataaatatatcacagaaaacttttaatccaaaaaatctgagcttcctgtctcagatttttttcatgctttcctttcagtattcaatagagctgaaatgtgctataatggtactaattttatggtaggaattcatagaacaaatcaataaaaaagaggtatacatatgtatccagatgacagtttaactttgcatactgatttataccaaatcaacatgatgcaagtctattttgatcaaggtatccacaataaacatgctgtatttgaagtgtattttcgtcaacagccttttaaaaacggttacgctgtatttgctggcttagagagaattgtgaaatacttggaaaacttgagtttttctgagagcgatattgcctatttagagtcacttggttatcatggggccttcttggaatatcttcgtgatctcaagttggaattgacggtacgatcggctcaagaaggagacttagtctttgcgaatgaaccaattgttcaggtagagggccctttagctcagtgtcaattggtggaaacagcccttttgaatatcgtcaactttcaaaccttgattgcaacaaaagctgctcgtattcgttcggtcattgaagatgagcctttgatggaatttggaacacgtcgtgcgcaagaaatggatgcggccatttggggaactcgtgcagcagtcatcggaggggccaatggaactagtaatgttcgtgcaggaaaactctttggaatcccagttttaggaacccatgcccattctcttgtacaagtatatgggaatgactatcaagcctttaaagcttatgcggaaacccataaagattgtgtcttcctcgtcgatacctatgatacgcttcgtattggggtaccagcagctattcaggtagcgcgtgaaatgggagataagatcaatttcctaggcgtccggattgactcaggagatattgcttatatttctaaaaaggttcgccagcaattagatgaggctgggtttacaaatgctaaaatctacgcttctaatgacttggatgaaaataccatcctcaacttaaaaatgcaaaaagcaaaaattgatgtttggggtgtaggaaccaagttaattacagcttacgatcaaccagcgcttggagcggtatacaaaattgtctctgttgaaaacgaagcaggagagatgatcaataccatcaagctttctaataatgcagagaaagtttctactccaggtaaaaagcaagtctggcggattacgagtcgtgaaaaaggtaagtcagaaggggactacattacttatgatggagtagatgtttctcaactgacagaacttaaaatgttccatccgacttatacctacatcaataaaacggtccgaaactttgaggctattcctcttttagtggatatttttaaagaggggcaattggtttatcaactaccaccattatcagaaattcaagaatatgctcgtaaaaattacgatcaattgtgggatgaatacaagcgtgtccttaatccacagcattacccagttgacttggcaaaagatatttggcaggataagatggatctaatcgaggaaatgcgtaacaaggccaatggagaaggagaagcaaaatgagtttgcaagaagagattatccaacaattgggtgtcaagcctagcattgatcctcaggaagagattcgccgctcggttgatttcttaaaaagatatctaaaaaaacatcccttcttgaaaacatttgtattagggatctcaggaggacaagattcgactcttgctgggcgattagctcaattagccatggaagaaatgcgctcagagacaggagatgcctcctatcaatttattgctgttcgccttccttatggggtacagacagatgaagaagatgctcaaaaagctttgacctttatccagccagatgtcagcctagtcgttaacatcaaggaatcagttgatgccatggaacgcgctgtcgaagcaacaggaacggatatctccgacttcaacaagggcaatatcaaggctcgcagtcgcatgattgctcagtatgctttagcaggtgcgcggagtggagccgttattgggacggaccatgcagcggaaaatattacaggtttcttcacaaaatttggagatggtggtgcagatattttaccccttttccgtttgaacaagcgccaaggaaaacaattgcttaaagccttgggagctgatcctgctctctatgagaaaatcccaactgcagatttggaagaagaaaaaccaggaatagcagacgaagtagcgctgggtgtcacctataatgaaatcgatgattacctagaaggcaaacaagtgagcccagaagctcaagccactattgaaaaatggtggtacaaaggccaacacaaacgccacctgccaatcacagtatttgatcatttctgggagtaaaaaggtccactggacctttttagcccgagtcttaaaataggaaaacgagacagaaatcggtaactcgcagagttcgatttcgtagtctcaccatacaatattgtgaaaagcatcaaaaagaagggcgatttcatccgtccttttcttctagattaaagtaaccaacttgcaacgttcaagttgcatgaaaaaatgaagggagacaatctatgaatcatcttggaagtcttgtcatagagacagagcatttatacttgaggcctttcgttttggaagatgcaccagcgatgtttgaaaattgggcttcggatcctgaaaccctgaaatatgtcacttgggatgcccatgcatctactgagagaaccagagaatcgatcaaaagatggatcgaacagtatcgtaaaccagatacttataaatgggcgctttgtttgaaaacatcactggatcaggtaattggagatattagtgtggtttctcaagaccaggaaagtcaatcatgcgagctaggttatatccttggcaagaaattctgggggcggggattcatgacagaagccgtcatagctgttttggatttcttattgaacaaagtcggatttaaagaaatcaaagccacttatgtcagtttaaatcctgcttcagggaaagtcatggaaaaggcaggaatgcagtatgtagaaaccatccctcatgccattcaacgcaaaggatattgcggggataaaatcatctattctaaacagaatccctctctatagggtgatttttacttgaagattctgctcaaaggattataatagtaaataatgaaaaaaggagattgctatgtcagaattaacgaaagaatttacagaccagctctatgctaattatgaagcaaatgtgaaatatgcggctcttgaaaatgctgttacccacaatgggatccatgcatcgcttgaaacgcgcaagagtgcagtagaaaatacaccagttttttcacttgatttgaccaaggataaggtgacaaaccaaaaagcatctggacgttgttggatgtttgctgctttaaataccttccgtcacaagatgatttcaagcttccaattggaggattttgaattgtctcaagcacatactttcttttgggataagtatgaaaaatcaaactggtttttggagcaagtgattgctacagcagaccaagaattgaccagccgtaaggtggcttttctcctacaaaccccacaacaagatggcggtcaatgggatatggtggtatctctctttgagaaatacggagtggttccaaaatcagtttatccagaatcgatttcttcaagcaatagccgggaattgaacacctacctcaataaactcttgcgtcaagatgcgcaaatcttgcgtgatttgattcactcaggcgcagatagtgaggcagttgcgagcaagaaacaagcgctgttgcaagaaatttttaacttcttggctatgtctttaggattgcctccacgtgaatttgacttttcataccgtgataaggacaaccaattccatagtgaaagtggcttaactccacaaagcttctacaaaaaatatgtagaccttcaattagacgattacgtctctattatcaatgccccaactacagacaagccatatggaaattcttacaccgtagatatgctgggcaatgttgttggtagccgtccagtccgctacctaaatgttccaatggatcgattgaaagaattagccattgctcaaatgaaagcaggggaaactgtctggtttggttcagatgtaggccaagtcagcaaccgtaaagccggaatcctggcaacagatgtctacgattttgaagcaggcatggacattcatttgacacaagacaaggcgggtcgcttggactatgcagaaagtctcatgacacatgctatggtcttgacaggggttgatttagacgaagcaggtcagtctcgtaaatggaaggttgaaaattcatggggagacaaggtcggtacagatggttactttgtggcttctgatgcttggatggatgaatatacctaccaaatcgtggttcgtaaagaattcctaacagcagacgaattagcagcctatgaagcagaaccaattgtcctagcaccgtgggatccaatgggagctttggcaaaataatgatacagaaaagagccgaaaggctcttttttttatatactcaaaaataaaaaagctgggaagtctaactaaataaatcagattttattcgttctggttttttaaccattgttaaaaaaaagccgggcgaaaagcccgacttctctgttatattattcgttatgattgttagagtcttgtgaagaaggctcagatggtttagatggattttcttcgttcgaagagctagacgatggttcttcatacgaatactgatcagtggaataacttggctcatagtagtagttattgtagttgttcttaccattgtttaagtagagataagaaccacttcgatacagtccacttggttgcgtccaatccgtatgaccagagttattattattagcaagatagagcatcatttgacggtagacatccgttgcgacctgtattccattatccaatactggtgtaaagcgattggaataacccgtccagacggccatagcatattcaggtgtgtatcctacgaataattcatctggtgtcacaatacttgaataacctatattttttgttaacttattgacctcgttatcatcatagtttgatgtaccagtcttaccagcttggtagattcccgaaatggcagcatttgtaccggtaccagacaagagaactgtcttcatcatatctgtcatcatgtaggcagttgttgctttcattgcacgagttccttcggactcaaattccttggttgtgccatcactaaagacaacccgactaacataggatggtttgtaataggtaccgccattggcaaaagcagcataggcagctgccattttctcactgctggctccgtatttgttgctagaatcgctagtgttactcgagatagcgttggcgtaaaccatttctgggtaatcgatccctaatccattgaggaatttcttagcttgtttaagaccaactttttccagggccttcaccgcaggcacgttacgagattgttgaattgcgtaggtaatggacatgctaccatagtatgaacggtcccagttgtagacaggcgttgatgaatgagggaagttgtatggcgcatctgttgtagtagctgctgtagaggtatattcctcatgttcaagagctggtgcgtaatctgtgattggtttcattgatgaaccccagtcacggttcgtttcaaccgcttggtttgtaccaaaggaaacattgctggattggtgacgagaacccagctgagcaatgactttaccagtattgacatcaataacggtagaagctacttgcatttcatcatccgggtaattgacatattcatctgtattgtagatatcccatagtttcttttgagcttctgtatccacgtttgtatagacatccattccggttgtcaacaaattgtagcccgtttcttcttcgacttgctcgatcacttcttttaggtaattatccatataagctggataactgcttgaagagctaagactttgaagaccatctgtaacaggtgtattcactgccgcttcgtattgtttattggaaatggacttcatatcgagcatttcttttaaaactaagtttcggcgttgaagtgccgcttcgggatgagaataaggatcgtattggttcggcgcttgaggcatccctgctagaagcgctacttgagggagcgatagatcttttaggtcttttccataatagctttttgcagctgtctgcattccatagttcccattcgccataaatactttattaacgtaataggtcaagatttcttgtttggttgctttcttttctagttgggttgctaaccaagcttcttgaatctttcgtgatagggtacgatcggaagcggaagttgagaaataggttaatttgatcaattgctgcgttaaggttgatcccccttggcttcctcctcgcaagttgtgaaggaaggagccaccaatccgaatgatatcgactccacggtgattgaagaatcggtggtcctcaatcgccacgatagcgttaaccaaatcagttgggatttggtctgttgagacgttgattcgtttctcagcacctaaatccgcaatcaagttattttgattgtcataaatcttactagatgttgtggcaaccagatctttttcagacaaggttggtgctttcatggcataataactaaatatcagtccaccgaggacaaataaaagtaagaaaaatgaaatggctgcgatggcaacatatttcaaccattgaatgactgtttgtttattcatttaaataccgcctagaagtttctgttcgataatatcaagataaggaacgcttggaagacgattcttatctactagaaagccgtgctcctgaatataggagaggggcatggatttactaccatgatcgatgttgtaatagtgaattaatgcaggagcaggaagtaagtaggtttcactcaactttgcaaaatgcaagagaacgaaacagataccgccttgctggacaaccgcctccatatgatcgatctgatgttgatgaaaatttttcatcggcatggattgcttttgctgtgtttccttagcttcaaaatcgatatagcgtcccttgtatactccagaatagtccgtcgttgaggcttgcctgaaataggcttcaacaatttttgcccgactgcgacgtggataatccactttcacgatttgaatcggtgttggttttttatggatgactgctagacctcgagaaagatagtattgattgctttcattgatcattttttcaaatgtcatcccacgattcgcaaagtcgactggatgtttcctttgtgtagagaccaaggtttttttggctactttatgtggatagttgaccatagttctccttattggtacaattacatcactctattatatcataaattagaataatgaggaaaaaatgaataccatacttgttgcaggttataagagttttgatgtgggagtcttttccaataaagaccctcgactgaccattatcaaaaaagccattgaaagagatcttcgtcgtctatttgaagaaggagtgaaatggctggtcttttctggtaatttgggatttgaggcttgggtactagaggtcgcctttgcattaaaaaaagattacgattttcaaatggcgacgatcttcctatttgagaatgttggcgaaaattggaatgaaagcaatcaggaattattagcacgcttcaaacaggtggatttcgtgaaatatgcctatccacactatagcaatccgggtcaactaaaagaatacaatcagtttttgatagataacgcggatggagcttatgttttttatgatccagaaaatgaaaccaatttaaaatatctttacaaaatgatggtagaaaaagaaccattttatgtcaaacaattaagttttgatgacttaaatgaacttgctgaaaatttttacgaaaactaagtgttataccttgatttttcttaccatttttttatataattgagatgatgaactagattggagagagtaatggcgagtattatttttactgcgaaagatatttttgatcaagatttcaaacgagaagttcgtggttataataaagatgaagtaaatgaatttttggatgatgtcataaaagactatgaaacctatgctgctttggtgaaggaattgcgtgaagaaaacgcacgccttcgtgaagaacttgcccaaaaagcacaggaaacaccacaaacatctccgattgctagcactgctacgcaagaatacccgcaagtgacaacagcgacgaactttgatattctcaaacgtctcaatcgtttggaaaaagaagtttttgggaaacagatcgtagatcgcgattagtaatcccatagattgtgcaatttttggataatcgcgtgagagaatattctcatgaggaaagtccatgctagcacaggctgtgatgcctgtagtgtttgtgctaggtgaatccataagcctagggacttggtattcaagttacggcgagtgaaggagctaagtctaaggataagctctagtaactctgaaagtgccacagtgacgtagtttttagggaaacctaaaaagtggaacgcggtaaacccctcaagctagcaacccaaactttggtcggggcatggaatgcgtggaaacgaacatagcattctgactggaaacagtagacagatgattatcaaaggaaatggtacctagtcatttctggaacaaaacatggcttatagaaaattgcatataggttgatgaggtggagagagatctcaacctccttttttaaagtgataggaataagatgaaaaaacaatttgaattgattgcaacggccgctgctggtatagaggctgttgttggtcgagaactacgcgatcttggctacgattgccaggttgaaaatggacgggttcgatttcaaggagaccgtcgagcaatcatagaaaccaacctctggttgcgagcggctgatcgagtgaaaattgtggttgggacttttccagccaaaaccttcgaagaactctttcaaggtgtctttgctttggattgggaaaattatttgcctttaggagcacgttttcctatttctaaggctaaatgtgtcaaatcaaaacttcataatgaacctagcgttcaggccatttcgaaaaaagcagtggttaaaaagttacaaaaacattatgcccggccagaaggtgttcctctcatggaaaatggggcagagttcaagatcgaagtatcgatccttaaagatcaagccactgtcttgattgacaccactggtagtagcctcttcaaacgtggttatcggactgaaaaagggggagcccctattaaggaaaatatggcagcggcaattcttatgctgtcaaactggtatccagataagcccttgattgacccgacatgtggttctggaacgttttgtattgaggcggcgatgattgcgagaaatatggcacctggtttacgtcggaccttttcttttgaagaatggaactggatggatgatcgcttgattcatgaagtccgtcaagaagcaagtagaaaaatcaatcgcgagatcgaattggatattatgggaactgatatcgatgcacggatggttgagattgccaaagaaaatgcccagaaagcgggcgttagcagggacattacttttaaacaaatgcgagttcaagatcttcactcagataagatcaacggggtgattatctccaaccctccatatggagaacgattatctgatgatgaaggtgtgacgaaattgtatactgaaatggggcacgtatttgcacctctcaaaacctggagtaaatttatcttaaccagtgatgaaggttttgaatctaaattcggtagtaaagcagataaaaaacgaaaactttataacggaaccctaaaagttgatctctaccaatattttggggaacgagtaaaacggcagataaaggcatagaaaggatttttatgacagagaaggataataagccattagagcaagaaacagaatcaattttagattttgaagatgctaaagagatgacgattgggcaggccaatcgaaaggcagaagaaatcgaagcaggtgtaacggaaggtgataatgtcttagacaaatacatcaaacaacaccgagcagaaattgaagctgaaaaatacgatacaaaaattttggccaaagaagaattggctaaagctgaagagttggcagcttcagaaacagttgctgaagtagctgaagcagtggaggcgccggaagtgacggaaacggtcttggaacaaaggcctgaaatggatgctatctcaactgaattacctgctaagattaaatttggtcccacaccaactgaaccaattgtagaagctgaggaacttcctgaggaaacaccaagcaatgcgggtaaacgaatcaaagcggttctatactctgcattaggtcttgcgattgtcggttcggccatttttgtgacctataactggatgcacagtcgtggaaaatctggtggtacaactgttgtatcgtcttcatctagcaagtcatcttctacttctaaatcaagtagcagtgaaacacaggctcaaaaattggaagagtttaccaaagcctacgatgccttttttgtagatgaatcaaaaagtgctcttaaaaatgataaattcggagacttggaaaatctgaagaaactgctggacaaattagaaggaagcagtgattataatgcggctaaaacaaaatatgaagaccttgtgaagcaagtttctgccattcaaaaagtgaattctcaatttagttctccagtcatcaaagatggagttcttgatgcaactgccaaagcgaaaagtgatgcgacctttgcagaaacaaagacaggcaatgaaaaattagatagcttattgaatgaggcggttgcgcaaggacgttcacaacaagttgcgacaccggcaccagtgacagggacaggtggtacagatacttctaatgcaactccagccccagctcaagcagcaacgcctacggccccagctgtcaatgctgctacaggtagtgcaggaacggcaaacccaggctattcagggtacggtcttccaagcgatggtgtcccacttcagcggaacttgagtcgtgtgccatataaccaagcagctatcaatgatgtcaataacccagcttgggtatttggtgatgggatccttgaaaaagtattgaatattgctcgtaaacgtgggcatatcactggcaatcaatacattttagagcgtgtcaatatcattaacggtaatggctattacaatctcttcaaaccagatggaacctatctctttagtatcaatgccaagactggttatttcgtaggaaacggaaaaggtcattcagatgctctggattattaatgcttgatcagacatcccttttctgggaaaaattacaataaaaaagagagtgggacagaaatcggtaattcgttagaattcgatttcgtcgtcccacctccgcacagttgagtagggctgtaaaagctgatgaaatcagcgtagtagagcccactcaaccactgcgtcttgctcgacaatccaaaaataattgagaggctaggaattttgtcccagcctctttttcgtattaaacaagatgacgttcaaatggatcatctgagattccttgatctagaatcaagcgacaccattctttggctgagaagaggctgtgatccttgtaatttccgcaagactcaatggttgtgcctgggacatcctcccaagtgctgatagaagcaatttcttctagagaatctttaatcactttagcaatttccgtacttgaatgctgtccccacatgatcatatgaaaaccggtgcgacatccaaatggggaacaatcaatcattccatcgatgcgtttgcgaataagcattgcaagaaggtgctcgatggtgtggagccctgccgttggaatcgcattttcattgggttgcaccaggcgaatatcaaagttagagatgatatctcctttgggtccagtttcctcaccaatcaagcgtacatagggagcctttacagctgtgtggtccaattcaaaactttcaacaattacttcttttgtcatactcaaatccttctttgtttttcttgattatagcataaaaaagcagattcaacaaagtggaaataaatgaattcctcacagatgttccatgaaagaaacgtggataaaagaacaagggttaagcaaaaatataaaaggtttttcctgtttttttagattgttaattttagtaatttatggtaaaatgtaaaagaatttttaattcaactaattaaatagatttggggtaaaagcatgaattttgtaattacaggtgtttttgccgcggtcattggtttagtcattggatatgtgggaactgctcttaaaatgaaagcttcaaaagaagctgcggaactcacccttttgaatgctgaacaagaagcaacgaatttacgtggacaggctgaacgcgaagccgatttgattttaaaagaggcgaagcatgagtcaagttcacttaaaaaagaagcacttttggaggcaaaggaagaagccagaaaatatcgtgaagaggtcgatgctgagtttaagtcagaacgacaagaattgaagcaattagaaagccgtttggcagaacgtgctagcaatcttgatcgtaaagacgacattttaacaagcaaagaacagtctcttgaacacaaagagcaaagtcttacagatagaactaaacacattgatgcgcgtgaacaacagctggaagagcttgaacacaagaaagtagaagaactggaacgtgtcgctgctctaagtcaaggagaagcgcgtgacattattttgagtcagacggaagagcaactttcaaaagaaattgcctcacggattcgtgatgctgaattggaagtgaaagaacgttctgataaaatcgcaaaagacattctcgtgcaagccatgcagcgaatggcgggtgattttgttgctgagcaaacaaactcaaccgttcatttgccggacgatagtatgaaggggcggattatcggtcgtgaaggtcgcaacattcgtacctttgagagcttgacaggtgtcgatgtgattattgatgatacgcctgaagtggtgaccttgtcagggtttgatccgattcgtcgtgaaatcgcccgcatgacaatggagagccttctcaaagatggtcggatccatccagcccgcatcgaagagctggttgagaagaaccgtcaggaaattgacaatcgtattcgtgaatacggtgaggcagctgcctatgaaattggtgcgccaaacctccatccagatttgatgaaaatcatgggacggttgcaattccgtacttcttatggtcaaaacgttttgcgtcactccattgaagttgccaaactttctggtattattgccagcgagttgggtgaaaatgctactttggcacgacgtgcaggattcttacatgatatcggtaaagcaattgaccgtgaagtggaaggaagtcacgtcgagattggaactgaattggcacggaagtacaaggaacacccagtggtggtcaataccattgccagtcaccatggtgacgtggaaccagaaagtgtcatcgcagtcattgtcgctgcagcggatgccttgagtgcagctcggcctggagcacgaagtgagtcacttgaaagctacatcaaacgcttgcaagatcttgaagaaattgcaaatagttttgaaggagttaagacaagtttcgcccttcaagcgggtcgtgaaatccgtattatggttagccctgaggcaatcaaggatgataaagtgacgatcttggctcatgatattcgtgagaagatcgagtccaatcttgaatatcctggaaacattaaggttaccgttattcgagaattgcgtgcagtcgattacgcaaaataaacaaaaagcttgagatctagcatctcaagctttttgaatgaaaaaatcagttgaaaattaggccgatttttgttacactagatagaaagacattgaaggagaaatcatggcggatcgtggcttattaatcgtattttctggcccttcgggggttggaaaaggaacggtcagacgagaaatttttgaaaactcggacaatcagtttcagtattctgtatcgatgacgacgcgtgcacaacgtccaggtgaagtggatggtgtcgactattttttccgtacacgtgaagaatttgaagatttgatccgtcaagggcaaatgttggagtacgctgagtacgttggaaattactatgggactcctttaacctatgtgaatgaaaccttggacaagggaatcgatgtattccttgaaattgaagttcagggtgcccttcaagtaaagaagaaagttccagatgcagtttttattttcttaactccgcctgatttggatgaattgcaagatcgattagtgggtcgcgggacagatagtgcagaagttattgcgcaacggattgaaaaagcaaaagaagaaatcgccatgatgcgtgaatatgactacgccattgtgaacgatgaagttcctcttgctgctgagcgtgtcaaacgtgtgatcgaagcagagcatttccgtgtagaccgtgtcattggccattatctggatatgttaccaaaaacacaaactattgtgaagagataaataattagaaattaggtataggaatatgatgttaaaaccttctattgatacattgcttgacaaagtaccatcaaaatattcattggtcattcttgaggcaaaacgggcccacgaattggaaagtggtgcagtaccaactcaagaattccaatcagttaaatcaacattacaagcgcttgaagaaatcgagtctggaaacgtagttgttcacccggatccagaagcaaaacgtgaagcgcttcgtcgtcggattgaagcagagcggattcgcaaagaagaagaagagcgcaaaattaaggaacaaattgccaaagaaaaagaagatggtgaaaaaatttaaggttggggcttctcaatcttattttttgctatttaaagggttccgtgataaagtaaagctcatatgatagaggctggaggtgaaaaagtgatagcaaaagtcatcgtagatgtcccattgatgcagacagataaaccctattcttatcagattccattagaatttgaggatatggtggaggcaggtatgcgagttcatgtcccctttggtaaagggaatcgcctcattcaagggattgtggtagatgttttagaagaggcagacacaagcgaggaattaaaagcgattgtggaggtcttggattacactccggtcttaaatcaagagcagttctggttggcagatcaattacgaaaaagtgttttttcttataagatcacgattttaaaaaccatgcttccttctctcctcaattcgagttatgataagattttgtatcctcaaccttctttagatccaactctcaaagtgaaactttttggtgaaaaaaatgaagtttctttttcttctctagatgcggccgatcaagcccaagtgatgcggttggtcagaaaaggagatttggtacttgaatacaaggccaaggataggaaacaaattaaaacagaaaaatggtatcgcgttaaccaggaaggattaaaagaacttcaaccatcaggaagagctaaaaaaaggctagcattgaaagagcgcctgttactagagcaaggggagcaacccttagcaggattgtatcaggatttttcacgagaagtggtagcttattttatcgaacagggtgttttagaaattacagaacgagaagtgaatcgggcggctgcatattatgaaggcaaagaacagacccaggctctgcttttaaattcagagcaagcaaaagctgtcgaaacagtagtttctcaaattgggaaaacatcaaaaccttttttactagaaggtgtgactggaagtgggaaaacagaagtttatctgcagattattcaagaagttctaaataaggggaaaacggctattatgttggttcctgagatttccctgacgccacagatgacggatcgttttatctcgcgttttggccaggaagtagctattctgcactcgggcttatcaaatggtgagaagtatgatcaatggcgaaaagttgaacgtggggaggctaaggtagtcgttggagcgcgctcagcaatctttgctcctttaaaaaacatcggagccatcatcattgatgaggagcacgaggcatcctataaacaagatagtaatccgcgctaccacgcaagggaagtcgcggtcctaagggctcagtacaatcaagcagttttgcttcttggatcggccaccccaagtttggaatcgcgagctcgtgcaacaaaaggggtttatgaattaattcgtctaacccagcgggccaatccggcagccaaaattccagaagttaaagtcgttgatttccgtgattatattggccaaaatgaagctggtaatttcactccggttctagtggaagctattgctgatcgcttgcagaaaaaagagcaggttgtcttgatgttgaaccgccgtggttattccagctttgtcatgtgtcgcgagtgtggaactgtagatacttgtcccaattgtgacatctcactgaccctccacatggatactaaaaccatgaactgtcattattgtggctatagtaaagcgattcctcgacactgtccaaattgccaaagtccttctattcgttattacgggacaggaacgcaaaaagcctatgatgaattacaagagatctttcctgaagctaaaattctgcgcatggatgtggataccacccgaaaaaaagggagccacgcagcaatattagatgctttcgggaatggagaagcggatattttgttagggacgcaaatgattgccaaggggttggattttccaaatgtgaccttagtgggtgtcttgaatgcggatacttctttaaatttaccggattatcgatcctctgagagaacctttcaactcttaactcaggtggcaggaagggccggacgagcagagaaagaaggagaggttatcattcaaagctacaaccccaatcattatgcgattcgatttgccaaagaccaagattatgaaggcttttttgcctatgaaatgcagattcgccggcagttaggctatacgccttattacttcacagttgggttaaccctatcccataagagtgaggaaattgtgatggagaagtcacatcaggtcatggaaattctccgatctggcttatctgatcaggtccaaatcttaggaccaacacctaaaccaattgcacgcacacataatttgtatcattatcaaatcattgtcaaatatcgtttcgaagaaggcatgacacaggtcttgaatcaaatcctagaatttacacaagaaagaggcaaccaagatctacgtgtcagtattgataatgaacctcaaagttttatgtaaggaagaaagaaatgacaaaattaatttttatgggaacgcctgatttttcagcgacggttttaaagggattgttagcagattcgcactatgaaattttggcggttgtgactcaaccagaccgcaaagtaggtcgcaaaaaagagattcgaatgaccccggtgaagcaggtagctttggaacatcaactaccggttcttcagccggagaaattatcgggtagtccagaaatggaaactctcttatcactagatgcagatggaattgtgaccgctgcttttggacaatttttaccgacaaaattgttggagaacttccaatttgcggtgaatgtccacgcgtctttattgcctaaatatagaggtggagctcccattcactatgccctgatcaatggtgataaagaagctggggttacaattatggaaatggtcaaggaaatggatgccggagacatgattgcagctcgttctctcccaattttagatgaggacaatgtgggaactttgtttgaaaaattggctgtccttggacgtgacttactcctagatactttgccagcttacctggcaggggagatcaagccaagtccacaagatccaagtttggtcacattttcaccgaatattttaccggaagaagaggttttggactggacaaaaaccaatcgccaagtctttaaccagatccgagggatgaatccttggccggtcgctcatacgttattaaatggtcaacgctttaaagtttatgaagcagagctatgcgaaggaaatggaaatccaggagaagtgattgctttgaccaaaaaagagttgctggtcgctgcaggagaaggcgcattgtccctcgaagttgtgcagccggcaggaaaaccaaaaatgtccatcacagactttttgaatggcgctggccgtcaattgaaagtaggagatcactttggaagttaaacaaatgaatgcgcgtgaacagattgttcgagtgctagaagaggtttttgagcagggagcttattctaatattgccctaaatcaagcgttagaacactctcaactttcagataaagatagaagctttgttacggaagttgtttacggtactgtagcacgaaagataacactcgagtggtatctcgcccacgtgattgaagaccggacgaaattagatccttggctctattatcttttgatgatgagtttgtatcaacttgtctatttagaccgcattcccgatcatgccatcgtcaatgaagctgtccagatagcaaaacgtcgtaaagaaggcagtgagaagtttgtcaatgctattcttagaaagctcctccgcgaggggctaccagctgttgatacgatcaagcgaaagaacaaacgttattcggtagagtattccctacctgtatggttggtcaaagcattgatcgaagaatacggtgaagaacgtgcttgcgctatttttaagagtctctatcagcgtaataaatccagtattcgtgtgattgatctggacgaaaaagaagagttggctcagctactcgaagcaacctcctctctacttgcttcgtccgctctcgtgaaagagcagggacattttgcggcgcattccttgtttaaagaagggcgcattactattcaagacgagtccagtcaattggtggcaccagctttggatttgcaaggagatgagtgggttttagatgcctgtgcggctccaggtggaaagacgacccacctggcttcttatctcacaactgggaaagtcacagccttggatctctacgaccataagctcaaattgattcaagaaaatgctaatcgactccatgttgcggacaaaattttgacaaagaagttagatgcgacaaaagtctttgaaacatttggacctgatgctttcgataaaattttggtggatgcgccttgttcagggattggtttgatacggagaaagcctgatatcaagtacaataaagagagtgcagattttgtatctttacaagctattcaattggccattctggatagtgtttgtcaaagtgtgcgtaaaggtggtataatagtgtacagtacgtgtacaattatgggtaaagagaattttgaagtggtggaccaatttttgaaaaaccatccaaatttcgaaaaagtcccattggatcacgaaagaaaagatattcttaaaaatgattgtatccttattacacccgaattatatggaagcgacggcttctttatcagtcgttttaagagaatctcataatatcaggaggaaactgacagtatggatattacgatcttaaccgatgtaggtcaaagacggacaaataaccaagactatgcaaatcaatataaaaacaaggcaggaaaatctatggttttacttgctgatggtatgggaggacaccgtgccggaaatattgctagtgaaatggcagtcacagacctaggtgcggcttgggtttcttctgagatcgagacggttaatcaagtacgggaatggtttgcagaacatttagaagctgtgaaccgtcggatccatttagctgggcaagatgatgagcacaaaggaatgggaacgacattggaagctttggcttttgtagaaggacaagtgatttatgcccatgttggagattcgcggattggcctcattcgtcagggcgaataccagcagttgaccagtgatcattctcttgtaaatgctcttttgcgagcaggtcaaatcacagaggaagaagcagcccatcatcctcaacgtaacatcatcactcagtccattggtcaaaaagatgagttggagccggattatggtttggtgacggttgaagcagatgattatattttgatcaatagtgacggtttaactaatatgattggcccggatgaaatcagagatattgtcttgagtgatgtttcactggaagaaaaagctcaaaccttgattcgttttgccaataatgctggaggcttggataatatcactgttgtactgctccactttactgaggaggacgcagcatgattcaaatcggcaaaatttttgccgggcgatataaaatcatccaacaaattggacgcggtgggatggcagatgtttatcttgcgcgtgatttgattttagatggggaagaagttgcagtcaaggtactgcgtacgaattaccagacggatcccattgcggttgcgcgttttcagcgtgaagcaaaggcgatggcagagctggaccatccaaatatcgttcggattacagacattggcgaagaagaaggacaacaataccttgcaatggaatatgttgcaggtttagacttgaaacgctatatcaaagaaaatgctcctttatcaaatgaagaagctgttcgtttgatggggcagatccttctagctatgcgtcttgcccatacgcgtggcattatccatagagatttaaaaccacagaatgtcctcttgacaccagatggaacagcaaaagtttcagactttgggattgcagtggccttcgcagagactagcttgacccagaccaactcgatgttggggtcggttcattatttgtcccctgagcaggcgcgtggatcaaaagctacggtgcaaagtgatatctacgctatggggatcattttctatgagatgttgacaggacacattccttatgatggagatagtgcagtcacaattgctttgcagcattttcaaaagccactcccatctattcgtgaagaaaataagaatgttccacaagctttagaaaatgtggtgatcaaagcgacagctaaaaaactgacggatcgctataaatcagtggcagagatgtatgtggacctttcaagttgcttgtcctacgagagaagaaatgagaaaaaattggtttttgaagaccaagcgaaagctgatacaaagactcttccaaaagtgagtccaactccaaagacggctcctgttccaatctctgaggtacgcagtgaaatcagttcggtagatcctaatcgaccattatctgaccagcagaccatggcgccaagtaaaaagccaagaagacgcttgcgggcgcgctacaaggtcttgtttgttgccattgcactagttcttgcagcctttactttcttgttgtatatgagcccagccaataaaacagttccagatgtttccggcaaaaccattgccgaagctagagcggttattgagggacaagaccttcaagtcggtgaagagaaagaagagtacagtgattcggttgcagaaggctatgtcattcggaccaatccaaatgcaggtgctcaaaagaaagaacaaagtcgcattgatttgattgtttcaaaaggtccaaatagttttgaaatgccaaactatgtaggagaaacacgagctaaagcagaggaagatctgaaaaatacttataaagtatcaagcaaaatgatcacgattgaagaagttgagaccttcgattatgctgcagggacagttcttgaacaaaccccagctccaggagagcaatattctctgaattcaaaaaccaagattgttttgaaagtagcgaaagaaacgacttcaattgaaatgccaaactatgttggatcaacttatgattttgctagaagtaatttgattgagatctatggtattaaagaagccaatatcgaattaagaaaaacggaacatctccctgatggggtagttgtttctgccggtcaaattgtcagtcaaactccagaagtttcgagtacggtggatattaaccgaacacgaattgttttgactgtatatgagcctaaagtgacggcttcttcaagtacgaaagcctcatcaagttcagatgcatctagttcatcctctgctgaacgatcagatacagaaagctccagcagtagtgcaactggtggagattcataaatcagtctaagactcagatggatttctgagtctttttgattgtctgctattatccaaccacagacggaagtcaaatgaggaaaaatttgataaaataggaaaagatgaggtagactatgtggaaaatacaaatttttattttcgttgaagccgttttgttaacattagcagcgatcaccattttatcaatcgatttttccagatttgttgtcttgatggttctctttttgctccttttgtattactattttggcaaacaaaaagcaaattttctattaattgcactgagcgtgctcttgttttttatcgtaatgctgaatccttttgtgattgcagccattttatttgcggtggtttatggtttattgatcgcctacccttatatgtataaggaaaatgaagccgttgtgtttgatgttgaagaggatacgaaaattcgtcaggaaaaaactcgatggattggtgatttacaacatttttcaaagcaaagtcgaggatatcgagatctgaatgtgatccgagtttttgggaatgacacccttcatttagaggaggttgccatatgcaattgggataatgtggtgatcattcggaaaggttttggaaatacaaaaattatcttaccgattgatttggatcttcatttacaaattaacactctttatggaaatctgaagtttttggatcttcctatccgaaagatgaggaatgaaaccttagatattgaaacggcacattatcggaggtcgcaccgttctattaaaattgtattagttggaatcgttggggatgtagaggtgattcgcgcatgaaaaaattagactatctccttttgtacttctattccctaatggtggttgcggtcatttgtcataccatttttcattttgttggttttcagtggagcaaacttctttcagatctttccttgcttcaatcattcctatttttggtttttagtctgacgcttgcattgacggctttggtggtcttaattatcaaaatcacgcaatttgtaacggttcatgcggtacaacaaaaggtggaagcgatcctaagcgcttcacagcgaaaagcaattgcccctaaagaattgaatcaacagttagatttattggataagaagttgcatcgacttgaagaaaatttacaaaaaagtgaaaatcgtgtgatgcgaaatgaggaagaaattattgaaatcgagcgtaagagaattgcgcgcgatctacatgacacggttagtcaagaattgtttgcagctaatatgattttgtccggagtggcttcacaggctcttgagttagagaaaaaccagattcagcagcaattaaatggggtatcggatattttgggtacagcccaaaatgatctacgtgtcttgctcttacatcttcgtcctacagaattggaaggaaaaagtttagtagaaggtatggagatgatttttagagaattgaaggaaaagagtgacctaaccgttgtcttccatcacaatgaagtaagcattccaaaagatatggaagaacatctgtttcggatcgtccaagaaattgtcagcaataccttgaaacatgctagagctcaacaaatggatgtctttttgcatcaggaggggaaacaacttcatttacggatggtagatgatggaatcggatttgagcaagaaaaattggaacgattgagttatggattgaaaaatattcaagaacgtgtagaagacatggcgggaaccattaaaataagaacgagtcctcaaaagggagtagctgtagatattcgcgttcccctccttgtaaaagataaaaatgaaaaggaaactgtatgaaagtattattagtagacgaccatgaaatggtccggttgggattaaaaagctttttgtccatgcaaaccgatattgagcaagtctcagaggcacaaaatgggcaagaaggcgtggagttggcgctgaaagaaagaccagacgtcatcatcatggatattgtgatgccagagctaaatggaatcgatgcaactctagccatcctaaaagagtggccggaagctaaaattgtcattttgacgtcttatttggataacgaaaagatctacccggttttagatgcaggtgcaaaaggttatatcttaaagacttcgtcagcaactgagatcttacaggctgtaaggaaggttgcaaagggagaatttgcgatcgagacagaagttagtcaaaaagttgagtcacgaaagaaccatgctgaattgcatgatgatttgacggctagagaacgagatattctggctttattgaccaaaggatatgaaaatcaacgcatagcagatgaactctttatttctttaaaaacggtgaaaacccacgtctccaatattttatcgaaactagaagttagtgatcggacacaagcagtcgtctatgccttccgacaccatctggtgaatcaggaagatttttaagttgaaacatgctataatagagcaaggaaaatagggggagacaagtggacgcaaaattacgttataaagcaaaaaaagtaaaaatcgtcttttttgatattgacgatacattacgtgcaaaaaaaactggattgatcccagaatctgtaaaagacgtctttcgtcagttgaaagaaaagggaattcgaacagggattgcaaccggtagaggggtttttggagttgttcctgaaattatggacttaaagcctgattttctagtcaccttaaacggtgcctatattgaagataccaaaggaactgtgatctaccaatcaccaatcaatgaagcaatcgtttcttcttttgtggattgggccaaagaatcccagattgattatgggttagtggctagtcatcaagctgccctgtccaatcgtacacctttgatcagtgatgctattgacatcatttatcccaacttaccagtagatccagatctgcatttgaaagaaccaattttccaaatgtggacctttgatgaagatgatggtgatttagaattatcaccttccttacaagaggagttacgtctagttccatggcacccacattcatctgatgttgttcgttttgatcgatcaaaggcttctggagtctctcaacttgtaaatcatttgggcttgaagccagaaaatgttttggtatttggggatggcttaaatgatcttgaactatttgattatgctgggattagtatcgcaatgggaatatctgccccagagttacaagaaaaagctgattatatcactaagaatttggaagaagatggcatattctatgccttagaggagttaaatatggttgaaaaagaattgacgttaccgcagttggaacttggtgtggttgaaggtcctatagctatgatcaaaaccaatcacggtgagatgaaaattcaattgttcccagatcaagcgccaaaaacagttgcaaattttgtggctcttgctaagtctggctattatgatggtgtcattttccatcggattattaaagatttcatgatccaagggggagatcctactggtacaggtatgggtggtgaatccatctatggtgagagctttgaagacgaattttcaaaagaattgtacaatattcgcggagccctttcaatggcaaatgctggaccaaacacaaatggcagccaattctttattgtacaaaatcaacatctcccatattcgaaaaaggaattggtccgcggtggctggcctgaaaaaattgccgaaatctatacgacagaaggaggaactcctcatctagatcaacgccataccgtatttggacaattgatggatgaagcttcatttgtggtattggatgagattgcggctgttgagacaggtatgatggataagccagtagaagatgtcgtgattcaaaccatcgaaattgaggactaaaatgaaaattggagataagttagaaggaaccatcacaggcattcaaccttatggagcctttgttgaactagagtcgggtgtcacaggcttgattcatatctcagagattcgaagtggctatgtaagtaatattcatgatattctttcgattggagagaaagtctttgtccaagtcattgatgttgatgaatattctaagaaagccagtctctctttgagaaccttagaagaaacaccgcaacgaagtattcgacaccatcgtttttcaaatgaccgcaacaaaagtggttttgctcccttagctcaacagatgccaacctgggtcaaagaaggaaaagcattctttagcaaacaagaaaaaaaataaaaacttcgataggttgatgaaacctatcgaagttttttggtatagtgagttattcaaattcgtaaagagtagtggaaaggtaacgttccccattatctggtgcaagggcaagaacttttttaccgctacctaattcttttgcgacttcaatagcagcatagatagcagctgcgcttgagataccgactaagaatccttcagttccaccgatagcgcgtgcaagttcgaaagcttcttctgaagatacacgacgaacaccatcatatgcgttagtgtctaaagtgtttggaataaaacctgctgaaataccttggattttatgtggtccaggtttttcgccagaaaggaccgcagattcattggcttcaacggcatagactttgacagcaggattgttctttttcaaagtatgagaaataccagaaacagtaccaccagtaccaacacctgcgacaaaagcatctaaaccatcttttccaaaggcattaacgatttcttgtcctgttgttctctcgtgtacctctgggttagcagggttttcaaattgaagaggaaggaagccatttctttctgcagcgattgcttcagctttagcgatggcacctttcattccttcacttccaggagtcaaaacgagttcagctccataggcttggatgattttacgacgttccacactcatggtttcaggcatgacaatcacaactttatagcctttagctgcaccaacccatgataaaccaatcccagtgtttccactagttgcttcgacaatggtatcacctggtttgatcaagccatctgcttcagctttttcaatcatgcttaaagcaatccggtctttaaccgatgatccagggttgaaggcttcgagttttacatagacatctgcagctccttcaggaacaagacggttcaatttgacaatcggagtgttcccaatcaattctgtaatattttcataaatagccataatatacctcagttctaggttttcttgatactaacaagtatagtctcttgtgggaagaatgtaaaatatagaaattttatgggtgtgataaaaaaaaactatcgttgccggtatgtactgaccccaaaaagttagacaaataatttaagttaaggatttagtcctgtattgcacaggactaagtccttttagttttaccttaattcgtttgttgttgtaatagtcaatatagtttacaatagcttgttccaattggttaagtgacttaaatgtattctcgtaaccataaaacatttccgatttcaaaatgccaaagaaggattccatcatgccgttgtctgggctgtttcctttacgtgacatggacggttgaattcctttatcctctaaaaaacgatgataatactggtgttgatactgccatccttgatcactatgaagaattgtatttgtgtaatgattctcagtaaaggcctggtctaacatagctttcacttgttctaaattcggtgaagtcgaaagattataggcgataatttcgctattaaaaccatctaaaactggcgataaataaagtttttgattgcttgctggaatggcaaactcggtcacatctgtgtagcacttttccattggcttggttgcttcaaattggcgttgaataagattatctgctttcttaccaatctctccttggtatgaagaatacttccgtttacgacgaatacgagcacttaaaccaaggaccttcatcagacgttggaccttcttatgattcactacaaaaccacgattcctcaattcaagagtcattcgacgatagccgtaattccctttatgctcagtaaaaatagattgaatttcaactttaacatcataatccttatcgctttgatcgagctgttttaaatgataataataagttgaacgggcaagcttaataatctttagaagaatctctaaagcaaactctgttaccaatcctcggacaatttccgtctttcttcttgctctttttcgtccctcaatcggagttctctcaacttttttagaaccgcattctccgctctcaagtactcattttctgcttgaagacgttctagttctgtcatctcttcgggtttcttctttggcttacgtcccattttaggtatccttcctcttgttttctcaacaatagtatacccgtttttcttatattgtgctatccaattatgcaacattccaacacttggaagagcataatctagagatacctttatttgtgaacgactttcaagcagaactttatcaatgatttcttgttttagttcgggagaatagtaacaattctttccttttttgacgatttctattccataacgatcaatcaatttaatcatgtacttaagattagaaatgtttatcccaaattgatttgaaagctctttgaagcttcgcccttgttttttatgttcatagatctgaactttatcttcataagttaatttcataataaaaacaccccaaaagttagatttttttctgtctaacttttggggtgcagttcagtagtttctttgattatttttctacagaaagtaggggtacttcaatctcgcgaattccttgatcttctataaggattttcccattataaaattcgactaaagcagctgtgatagaactggtgtcttctttgtctacaaaaatagttgtcgccacccgatctgtaaacatcggatcttgttctaccaatttgttgtcttttaagaaattagcaaattcttggtattgggaataagaaagtgtgatcccaagaacaacttgctccttgatttctacaagtccaatctctcgaactgcttgagccacacttccagcgtatgcacgaatcagaccgccagcacccaatttaatgcctccaaaatagcgggtaaccacaacacaactattagtgatgtgatgattctctaaaactcccaacatcggtacacccgctgttccactaggttcgccatcgtcactggtccgtttaatatcgctatgttctccaatgatgaaagcagaacagttatgtgtggccttgtagtgttccttcttgatcgcgttgataaaatctctagcttcctcttcagaagagacgcgtttaacatgacaaatgaatttcgattttttgatttcttcttgaacagtgccgttctctttaaatgtaatatattccatattcttattttacaaaaaaagaatgattttctccaatttttacgaattgataagtatgaagatagaagatgcttatggaaggctcttaacagagagccagatgacagacgatttaaaagaaatggcccaagaactcccaaccatagaaaaacaaaatggaaggtaccaatgttttcgatgtggcagtatgattgatcaaaaactttggaagttgagtgaagaggtcctgtattgtagagcttgtatccaattgggaaggatccagagtgatcaaaaactttatgctattgcacagcaggactttgagggacaagaggtgttaaactggaaaggaaccttgacttcctatcaacaagaggtatcagatggtcttatcaaagcagttaaagaaggaaaaaatgccttggtacatgctgtgacaggagctgggaaaacggaaatgatgtaccaggttgtagcaacagcgatcaagagtggacaagcagtttgtattgctaccccaagaatcgatgtctgtatcgaactgtacggaaggatgaaggaagatttttcctgttctatatcgttgcttcatggggaatcggacccctattttagaacacctttggtaatcgcaaccactcaccaattgttaaagttttatcaggcctttgatctccttattatagatgaggtcgacgcttttccctttgtagataatcctatgttatataaagcagctcagaatgcgataaaaaaagaagggaacaccctttatttaacagcaacctctacagatgagttagataaaaaggttaagaaaaaagaaatcatccgttatagtcttccaagacgtttccatgggaacccactagtggttccagaaataaaatgggtatcgaaaatgagagaaaaaatagaaaaaggaagaatcccctacgaactattgaaactaatcaagaagcaaagacagactcactacccattgttattcttcgtatcggaaatagagttagggcaacaatttaaagagaatataaaaaactactttccgaaagaaaaagtaggttttgtatcctctcagacacaggatcgcttgagaattgtagaagaatttagaaataaagaaaaaacaatactagtctcgactaccatacttgaaagaggagttacctttccgcttgtagatgtttttgttttagaaagcaaccatcgcttgtttacgaaaagtgcccttgtacaaatctcaggaagagttggacgtagcaaagaaagaccaacaggccaattgctctttctatcagatggaataacaaaagaaatgaaaaaagcaatcaaggaaataaaacaaatgaatcaggaggctggattttgaaagaatgtctgctttgtaataaagagttaaaaactagtgaacatttcacagaccttatttttatgaatcaacaagaagaatggatttgtaaagaatgcaaagaagacttcgaacaaattggcgaaatccattgtcctagatgttataaagataaggaggagaaagtatgtaaagattgcgaatactggatacaaaaggggaatatggtcgaacatgaagcattatatagatataatacagcaatgaaggactatttcaagcgatataaatttgaaggcgatcgtttattaggaatggtatttgcaagtgacctcaaaaaagccttgaaaaagtataaaagctatacgataataccgactccaatcagccatgaaaaaaggcaggaaagaggattcaatcaagtatcgactatactagattttgcagagataaagtacagcagtgtcttccaaaaagaagacactttagcccaatcaaaaaaaacaagagaagaaagattaaaaacctctcagcactttcaattaaaaggagaaatttcaggaaagcagaaatatctaatcttcgatgatatctacacaacgggcaaaacaatcgaattaatgaagcgcctactaattgaaaaaggtgtgaaagaaataaagacattttcaatcgcaaggtaaaaaaagatttgcaaaaactttatgaaagcgttataatatacatataaataaaaacataatgtttagaaagtaggtactaatatgattaaatatagtatccgtggtgaaaacctagaagtaacagaagccattcgcgactatgtcgtttctaaactcgaaaagattgaaaaatattttcaggcagatcaagagctagacgctcgagtaaacttaaaagtttaccgtgaaaagaccgcaaaagtagaagtgaccattccgcttggatctatcacacttcgtgcagaagatgtctctcaagatatgtacggttcaattgatctggttgtggataaaattgaacgtcaaattcgtaagaataaaacaaaaatcgaaaagaaaaatcgtattaaatctggtgcgggtaaattgtttaccgatgcagttgtagaagaagcagcaaccacagaaaaagttgttcgctcaaaaacaattgatctagaaccaatggatttagatgaagcgatccttcaaatggatctattagcacacgatttcttcatttatcgtgatgcagaggataacacaacaaatgtgatctaccgtagagaagatggagacatcggtctattggaagtaaaagaatagagatcaaaaaagagatcgaaaacatcaattaattatagaggaatcaggagcatttatgctcctgattttttagataacccaaagaagtaagaatattttttaagaaaataaaattttttgaaaaaaagtgttgacagtaagggtaggtcatgatatactaatatagttgtcgcgcgagagcgacaaagacctttgaaaactgaacaagacgaaccaatgtgcagggcgctataactaaggttatagtaactgaacaataaaaaaacaataaatctgtcagtgacagaatgagtttaagacaaacaattattttaatgagagtttgatcctggctcaggatgaacgctggcggcgtgcctaatacatgcaagtagaacgctgaagcttggtgcttgcaccgagcggatgagttgcgaacgggtgagtaacgcgtaggtaacctgcctcttagcgggggataactattggaaacgatagctaataccgcataaaagtcgatatcgcatgatattgatttgaaaggtgcaattgcatcactaagagatggacctgcgttgtattagctagttggtgaggtaacggctcaccaaggcaacgatacatagccgacctgagagggtgatcggccacactgggactgagacacggcccagactcctacgggaggcagcagtagggaatcttcggcaatgggggcaaccctgaccgagcaacgccgcgtgagtgaagaaggttttcggatcgtaaagctctgttgtaagagaagaacgagtgtgagagtggaaagttcacactgtgacggtaacttaccagaaagggacggctaactacgtgccagcagccgcggtaatacgtaggtcccgagcgttatccggatttattgggcgtaaagcgagcgcaggcggttagataagtctgaagttaaaggctgtggcttaaccatagtacgctttggaaactgtttaacttgagtgcagaaggggagagtggaattccatgtgtagcggtgaaatgcgtagatatatggaggaacaccggtggcgaaagcggctctctggtctgtaactgacgctgaggctcgaaagcgtggggagcaaacaggattagataccctggtagtccacgccgtaaacgatgagtgctaggtgttgggtcctttccgggactcagtgccgcagctaacgcattaagcactccgcctggggagtacgaccgcaaggttgaaactcaaaggaattgacgggggcccgcacaagcggtggagcatgtggtttaattcgaagcaacgcgaagaaccttaccaggtcttgacatccctctgaccgctctagagatagagttttccttcgggacagaggtgacaggtggtgcatggttgtcgtcagctcgtgtcgtgagatgttgggttaagtcccgcaacgagcgcaacccctattgttagttgccatcattcagttgggcactctagcgagactgccggtaataaaccggaggaaggtggggatgacgtcaaatcatcatgccccttatgacctgggctacacacgtgctacaatggctggtacaacgagtcgcgagtcggtgacggcaagctaatctcttaaagccagtctcagttcggattgtaggctgcaactcgcctacatgaagtcggaatcgctagtaatcgcggatcagcacgccgcggtgaatacgttcccgggccttgtacacaccgcccgtcacaccacgagagtttgtaacacccgaagtcggtgaggtaaccatttggagccagccgcctaaggtgggatagatgattggggtgaagtcgtaacaaggtagccgtatcggaaggtgcggctggatcacctcctttctaaggaaatggaaacctgtacgttggtcttgtttagttttgagaggtcttgtggggccttagctcagctgggagagcgcctgctttgcacgcaggaggtcagcggttcgatcccgctaggctccattaacactttagtagtgttaagtttgaacattgaaaattgaatatctatatcaaatagtaacaagaaaaataaaccgaaacgctgtaaatatttaaagagtttaggtcgtaagaccaaaaataaggttaagttaataagggcgcacggtggatgccttggcactagaagccgaagaaggacgtgacaaacgacgaaatgctttggggagctgtaagtaagcgacgatccagagatgtccgaatgggggaacccactagctaatggctagtactcctatctgttaaggataggtagaggaagacgcagtgaactgaaacatctaagtagctgtaggaagagaaagcaaaagcgattgcctgagtagcggcgagcgaaacggcaggagggcaaaccgaagagtttactcttcggggttgtaggactgcaatgtggacttaaagagtatagaagaatgacatgggaaggtcagccaaagagagtaagagcctcgtattcgaaatagtctttatacctagcagtatcctgagtacggcgggacacgagaaatcccgtcggaatctgggaggaccatctcccaaccctaaatactctctagtgaccgatagtgaaccagtaccgtgagggaaaggtgaaaagcaccccgggaggggagtgaaatagaacctgaaaccgtgtgcctacaacaagttcgagcccgttaatgggtgagagcgtgccttttgtagaatgaaccggcgagttacgatatgatgcgaggttaagttgaagagacggagccgtagggaaaccgagtctgaatagggcgcattagtattatgtcgtagacccgaaaccatgtgacctacccatgagcaggttgaaggtgaggtaaaactcactggaggaccgaaccagggcacgttgaaaagtgcttggatgacttgtgggtagcggagaaattccaaacgaacttggagatagctggttctctccgaaatagctttagggctagcgtcgacattgagattcttggaggtagagcactgtttgggtgaggggtccatcccggattaccaatctcagataaactccgaatgccaatgaattatggtcggcagtcagactgcgagtgctaagatccgtagtcgaaagggaaacagcccagaccaccagctaaggtcccaaaataattgttaagtggaaaaggatgtggggttgcacagacaactaggatgttagcttagaagcagctattcattcaaagagtgcgtaatagctcactagtcgagtgaccctgcgccgaaaatgtaccggggctaaaacaatttaccgaagctgtggatacctttataggtatggtaggagagcgttctatgtgtggagaaggtgtaccgtgaggagcgctggaacgcatagaagtgagaatgccggtatgagtagcgaaagacaggtgagaatcctgtccaccgtaagactaaggtttccaggggaaggctcgtccgccctgggttagtcgggacctaaggagagaccgaaaggtgtatccgatggacaacaggttgatattcctgtactagagtatgtagtgaaggagggacgcagtaggctaactaaagcgtgcgactggaagtgcacgtctaagcagtgaggtgtgaattgagttaaatgcttaattctataacattgagctgtgatggggagcgaagtttagtagcgaagttagtgacgtcacactgccaagaaaagcttctagcgtttaaacatactctacccgtaccgcaaaccgacacaggtagtcgaggcgagtagcctcaggtgagcgagagaactctcgttaaggaactcggcaaaatgaccccgtaacttcgggagaaggggtgctggctttcagtcagccgcagtgaataggcccaagcaactgtttatcaaaaacacagctctctgctaaatcgtaagatgatgtatagggggtgacgcctgcccggtgctggaaggttaagaggagtgcttagcgtaagcgaaggtatgaattgaagccccagtaaacggcggccgtaactataacggtcctaaggtagcgaaattccttgtcgggtaagttccgacccgcacgaaaggcgtaatgatttgggcactgtctcaacgagagactcggtgaaattttagtacctgtgaagatgcaggttacccgcgacaggacggaaagaccccatggagctttactgcagtttgatattgagtgtctgtgccacatgtacaggataggtaggagccattgatatcgggacgccagtttcgatggaggcgttgttgggatactacccttgtgttatggccactctaacccggtaggttcatcatctacggagacagtgtctgacgggcagtttgactggggcggtcgcctcctaaaaggtaacggaggcgcccaaaggttccctcagaatggttggaaatcattcgcagagtgtaaaggtataagggagcttgactgcgagagctacaactcgagcagggacgaaagtcgggcttagtgatccggtggttccgtatggaagggccatcgctcaacggataaaagctaccctggggataacaggcttatctcccccaagagttcacatcgacggggaggtttggcacctcgatgtcggctcgtcgcatcctggggctgtagtcggtcccaagggttgggctgttcgcccattaaagcggcacgcgagctgggttcagaacgtcgtgagacagttcggtccctatccgtcgcgggcgtaggaaatttgagaggatctgctcctagtacgagaggaccagagtggacttaccgctggtgtaccagttgtctcgccagaggcatcgctgggtagctatgtagggaagggataaacgctgaaagcatctaagtgtgaaacccacctcaagatgagatttcccatgattttatatcagtaagagccctgagagaagatcaggtagataggttaggagtggaagttgtgtgagcaatggagcggactaatactaatagctcgaggacttatccaaagagtcagaagatattgacaacgtgagtttaacttgttagaatatagatgttcaattttgaatgtttaatcattcagagttaagtgacgatagcctaggagatacacctgtacccatgccgaacacagcagttaagccctagaacgccggaagtagttgggggttgccccctgtgagataaggtagtcgcttagcaagagattgagcctagtagatactaggctcatttgggagtttagcttagttggaatcgagaggtattcgagattccaatcggcggataagagaaacgtagtttctcaccgttggctgagttaaacgaccatctgggagtttagctcagctgggagagcatctgccttacaagcagagggtcagcggttcgatcccgttaactcccataggtcccgtagtgtagcggttatcacgtcgccctgtcacggcgaagatcgcgggttcgattcccgtcgggaccgttaagataatgaaaattattttaagactcgttagctcagttggtagagcaattgacttttaatcaatgggtcactggttcgagcccagtacgggtcatattttgcgggtttggcggaattggcagacgcaccagatttaggatctggcgctttacggcgtgggggttcaagtcccttaacccgcataagagaataataatgagccggcttagctcagttggtagagcatctgatttgtaatcagagggtcgcgtgttcaagtcatgtagccggcatttttttatataaagaaagcaatgcgaacgtagttcagtggtagaacaccaccttgccaaggtgggggtcgcgggttcgaatcccgtcgttcgcttgaggaggccggggtggcggaactggcagacgcacaggacttaaaatcctgcgattggtaacgatcgtaccggttcgattccggtcctcggcatagacaaaggttgaaagaagcacccttagctcaactggatagagtacctgactacgaatcaggcggttagaggttcgactcctctagggtgcatggtcgcaaggctatgtaataattgaataggaacgagcacccttagctcaactggatagagtacctgactacgaatcaggcggttagaggttcgactcctctagggtgcataaagcgtaagctttagatcgggaagtagctcagcttggtagagtacttggtttgggaccaaggtgtcgcaggttcgaatcctgtcttcccgatagtatattaaaagagtctaatgatgtcattagatttttttttataatttacaagaaaaaagagcttgcgctctttccaactttatttatttcgcagttcaacataacggttataccatattttgatatattcctctgaaaaaggacctttgttttggtttatccaatctactagtacttttacattttcttttaaaatatagtcaatgtcatctgaatagtgcattttttctttatgttgctcatattcttcaacatctaacaatttcttttcaccatttgtaaagaccttgacatcgagatcatagtcgatatattttaaggcctcttggtcgatgtgaaaaggacttgctaggttacagtagtaagacacaccattgtcacggatcatggcgatgatgttaaaccaatattttttatggaaataaacaattgctggttcacgagtgatccaacgtctgccatcactttctgtaacaagtgtatgatcatttactccaataattgcattttcggttatctttaataccatggtgtcacgccaggtacggtgtaaactgccatcatgtttataactttgaattgtaataaagtcgccttctttaggtagtttcataacttaccaactttctacaatctaagtatatcctctatattgtaacatatttttttaatttttttcttatttttctattttattttcaatttgatttttgaatgggaatttatgaatctaaaaattctctaatggctgatgttatatcactataatcgtacccttttctggctaatgcttgggttaaacgttgttttaggtcatagccttcatattttttactgtatttacggtattgtttttctaattcttttaggatgagctcattggttgtttcttcatctgcttctagttcaagattttggaatgcaatctttgcttggttgtatgcaaaaccttttgaaatgagtccttggatgattttcgtttcaatggcttttaatgggtattttccttggtatttcttttggagttttattgcggtacggctaataacttctgtaaaatcatagtcagcaagaatttcttgaaggatagattttgggacccctttttgttgaattttttgttgtaataagacagggcctttatcgccactgaggaggttggcctctatcaggtttctggcatattgacgatcatctaaccacttttcttcttttaggtgttggacaactttatcaataatctcagtatcaatctcatattttgtaaggtagtctcggacttcttttgttgttcgagctttaaaggaaagatggtaaagggccaggtttttaccataggagtattgtgcaaactcttggatttcttttagctcttcttcactgatttctttctctttggaaagaaaatatttgacgatggtatcttctgtgatgtaaagtttttgatcattgtctaattcaagaaggtagagtctttttttcttttctagttttgtaattttcatattttttcttttatccaaacgcttcaaaggcagcaacgagtcgaagtttatgtatatcgacctgatctcttccataatagtcaagaaatagttcagcgtatttaggatcttgtaggttatagttgagggaccaaactgcccaaaagaggtcgatatgccggtcactgaaatcagccaaaccaagatcaataaagcaagagaattggtcagcatcttttagaataaagttcggtagacaggcatccccgtgaataaaggcatctgtctttaaaaggtgcccatgttcttggatgagttggaaggcctcttcgcgactgttgatttggaattggggtaggagcgccttggcatagaactcacctttttcatagtttttcaaggctctttctttataggcttgtaaatgattatctgatggaaaatttttcggatttaagctgtgaagctttttaagagcctctgccatggtacggcagattttttctggctggtctaaaaaagcgagagcatcatggccaatagcctctttagtcaggaggtagtctttatctttagatagatattcgataactggagttcccagtcctttggtttcaaaccaccttgcaatgctagcttctcgctctaatcttcccttttgatctattttcaagtagtaacctgaatcaagatagagaacccttgcgcctgaatgagaagagctatcagaaagagttgctccctctatataagttcgtaattgctcaggaaaatccaatggggagaaatgagatgtctttgtattcatggttttattgtaacatattcttaaccattgagaaactacgtggtataatagacttatgagtcttaaagtcaaacaaaaaattccattaaaaatcaagcgtatggggataaacggggaaggtatcggatttttccagaaaacccttgtttttgttccaggagccctcaagggtgaagatatcttctgccaaattacaagtgtcaagaaaaattttgcggaagccaaactcttatctgtgaataaagcgtctaagtatcgggtgacacccatgtgtgatatctatgagacctgtgggggctgtcaaatcatgcatttgaagtatgacaagcagctggagtttaaaacagatttattgcaacaagccttgaaaaagttctcacctgaaggctttgaacagtatgacattcggccaacaatcggaatgcaggagcctctttactatcgggccaaattgcaatttcaaacaaggaaatttaaaggccaggtcaaggcgggtctctatgctcaaaattcacattatttggtagaattaaaagattgtttggttcaagatcaggttattcaagcgattgccaatgattttgcggatttattgacttactatcagattccaattgctgatgagcgtaaagaactgggtgtcagaactatgatggttcgacgagctcggaagtctggtcaggttcagataattgtggtcaccagtcggcagattaatttaaaggatttagtggaagacttggttaagaaacaccctgagattgtcaccgttgctgttaataaaaatacgtctcgctccagtgaaatctatggtgaacaaacacagattatttggggtgaagaggctattcttgaaggcgttttggattatgaattctccctctctcctcgagccttttatcaactgaatccggagcagactgaagtcttgtatagtgaagcggtcaaggctttggatgtatcgccagaggatcatctaattgatgcctactgtggggttggaacgattgggtttgcttttgctaatagagtgaaaagtgttcgggggatggatatcattcctgaagcgattgaagatgccaaatacaatgctaaacggatgggatttgataatacccactatgaagctgggacggctgaggaaattattccccgttggtacaaagaaggctatcgagcagatgcagtcattgtggatccaccccgtacgggtttaggggcgaaattgatcgagaccttattgcactatgcacctgacaagatggtctatgtctcttgtaatgtatcgactttgtcaagagatttggtagctttgacaaaggtctatcgggttgaatacattcaatcagtggacatgtttccacatacggcaaggacagaggctgtcgtgaagttagtgaagaagtgaaaatgaacgaaatgagtaaaggaaataggaaaatggacaatgttattgatgtatcgattccagtggctcaagtcattgatcaacatccggaagtattggacttgttggtggagttgggctttaaacctttagccaaccccatcatgcgtaatacagttgggcgcaaggtttccttgaaacaaggatcaaatttagaaggtacccccatggagaagattgtacaaacgctagaagctaatggctatgaagtagtggggctagaccaatgagtgatgaacgaattcatgtcttgagagatatcttattagacctgcatcatggagcctctcctgagtcggtccaagagcgctttgatgcgacctttgcaggggtttctgcgattgagatctctctcatggagcatgaactgatgaactccgatgcaggggttacttttgaagatgttatggagctttgtgatgtccatgccaatctctttaagaatgcggttcaaggggtcgaagtagcagatactgaccacccagggcatcctgttcaaatctttaaacaggagaacttagcccttcgagccgctatgatgcgggtacgtcgcttgctagacaattatgagacgactgaggatcctgagatgattcaggagattcataagggcttgttacgtcagctgggcttggtgggtcaatttgaccggcattaccgtcgtaaggaagagttgatgtttccgattatggaaaaatatggtcatgattccccaccaaaagtgatgtggggagtagatgaccagattcgggaactctttgctaaaactttggatgcggcaaagaaattaccggattctagtatttctgaagtcaaggaacgctttgaagcctttgcacaagagtttgagggcatgatcttcaaggaagagtcgatcctcttgatgattttgctggagtcctttacccaggatgactggctctccattgcagaagaaagtgatgcttatggttatgccattattctctcaagtgagaaatgggtgccgaaacgtgtggacttcaaggaagaaggagcaagagagtcagagagttcaactgaaccgcttccttcttcaaaaggagatgagcaccgtcaggtcattgagactcctgagggacaattgacgattaccttcacgcctaagaaaaaagaagagagcttcgatcgcaagcagccacaagcttttggtcatggatttttatcggtggagcaagcgaatttaatcttgaaccagttaccaatggagatcacctttgtcaataaggatgaaattttccaatattacaatgatgctgcgccttttgaggaaatgatttttaagaggacgccatcgcaggtaggacgcaatgttgagctgtgtcacccaccgaaatatttggagaaggtcaaagccatcatgcaggggcttcgtgaagggaaaaaagacaagtatgaaatgtggttcaaatcagaatcgcgtgggaaatttgtccatgtcacctatgcagcagtgcgtgatgaagcgggagactttcaaggcgtcttggaatatgttcaggacattcaaccttatcgggagatcgatacggatttttatagaggaatggaataaagatgagttacgaaacagagtttatgaaggagtttgaggagtggatcaagacccaagttatgatcaatgaaatggctctcgaagaaagtaaaaaggtttttgatgaagaccaggacgaacgagctaaaatagccatgattcgctatgaaagccgtttagatgcttatcagttcttgcaaggaaagtttgaaaatttccatgctggaaaaggatttcatgatttaccagatggcctctttggtgaaagaaaatattaaaatggccttattgaaggcgttttactagctagattcacctgaaaattgtgcaatgacttgattttttaggggattgtgatacaataaaaaagttgaaatgacatcaacggatttttgaatggaattatggtgatgaaaccttgttgccttaggaattgatcactgaatttaggaggaaaaatggcaaagaagaacgtaaaccgtgcgaaacaatacaaacatcaaaatagacatcttttgaaaaaagctgtcgcaactgtaactgcagctgtgaaagaagcacctaaaaaggttgagaaagctacaaaagcagtggcgaaagaagtgaaacatgcggcttcttcagtggaagaatttgctgcaagtttggaaggtgtggcacttgatcgtgcgcaaacattctatgatgaaggtattcgctctgttgcggacttcgcaaactggacagaaaaagagttgttggcccttaaaggaatcggcccagctacaatcaagaaattgaaagaactcggcgttaaatttaaataatcgcttttgtgatttcttgctatttccaggtaaacttgctaaaatgaacctattagaggtgttttgaatcccacattttacagaaagtggcggtgctgagaagtccacaaatgtgtcaaaactggttgctaatagatgaaaatgaaataaacaaagttgcgggcattgcccgaaattgggtggtaccgcggattaatacattcgtccctgtcagattaatgacagggacgatttttattttatccccctagctgaaggagcttgtcatgaaacaatcttttaacaccagtaaactctactatggctttcctatcttcatcctggggtatcaggaccagaactttggacataatatcacgacctgcagttcctcttatagcctgggcgattggctggtcatcggggttggtgctgaggaaaatgcggctgaccagattaagcattaccaacagttcagcgtgaacatccctgatgaaaactttatgctggagatggagcaggctggctttatcagccatcgggagaaattgaaacacctggggctagactacgagatttctgaacggactcaggccctgtttttagaggcttgtccagtcgttttggattgccaggtggatcggattatcgaggaagatggtatctgtcatatttttgccaagattctcgagcgactggctgatccagagctcttagatgataaggggcattttataaatgaccgttttgcaccgacctactttatgggggacggtcaccagcgtgtttatcgttatctggacgaccgagtcgatcccatgggaagctttatcaagaaagcgaggaagaaagatgacaagagctgaactgccagaaagaatagaaaccgagcgtctggtcttgcgagtccgaacagtggcggatgtagaagatatctttgactatgctagtcgtccagaagtctcttacccagcagggtttccacctgccaagaccttggaagatgagatttattacctagaacatatccttcccgaacgtaatcaaaaggataatctcccagcaggctatggaattgtggtcaaagggaccgataaaatcataggctcagtcgatttcccccgtcgctacgaagacgatgtactggagattggctataccttgcacccagactattggggccgaggctatgtgcccgaagcagcgcgtgccttgattgacctaggttttaaagaattgggacttcacaagattgaactaacctgctttggctacaatgcccaaagtcaacgtgtcgctgagaagcttggtttcacccttgaagctcgtatccgagaccgtaaagatgcccaaggcaatcgctgtgacagtctgatatacggcttgctgaagagtgagtgggaaactcaagatcaacattaaaaatagaaataactagaaaggacacacacatgtctaaagaactttcacctaaatacaatccagctgaggttgaggctggtcgttaccaaaaatggcttgacgaagatgttttcaagccttcaggcgataaaaaggctaagccttactctatcgtcattccaccaccaaacgtaactgggaaactccaccttggtcacgcttgggatacaactttgcaagatatcattatccgtcaaaaacgcatgcaaggctttgatacgctttggcttcctggtatggaccatgctgggattgccactcaagctaaagtggaagcccgtttggctgaggatggcatctctcgttatgaccttggtcgtgaaaaattccttgagaaagtctgggaatggaaagacgaatatgccactactatcaagcaacaatggggcaagatggggctctctgtagactattctcgtgagcgtttcacccttgacgaaggtctatcaaaagctgttcgtaaggtctttgtagagctttacaagaagggctggatttaccgtggtgaatttatcatcaactgggatccaaaagctcgtacagccctttctgatatcgaggttattcacaaggatgtggaaggtgccttctaccacatgaactacatgttggaagacggttcacgtgcccttgaagtggcaacaacacgtcctgaaaccatgtttggggatacagccgtagcggttaacccaaatgatgaccgttataaagatttgattggtaaaaatgttatcttgccaatcttgaacaagccaatcccaattgttggggacgaacacgcagaccctgaattcggtactggtgtggtgaaaatcactcctgcccacgaccctaatgacttcttggttggtcaacgtcataatcttccgcaagtcaacgttatgaacgatgatggtaccatgaatgaattggctggtgaattcaatggcatggaccgctttgaagctcgtaaggctgttatcaagaagttagaagaaatcggtgcgcttgttaagattgagaagatgacccactcagttggtcactcagagcgtactggagttatggttgagccacgcttgtctacacaatggtttgtgaagatggaccaattggctaaaaatgctattgccaaccaagatacagaggacaaggtagaattctacccacctcgtttcaatgataccttccttcaatggatggaaaatgtccacgattgggttatttctcgtcagctctggtggggtcaccaaatccctgcctggtacaatgctgagggtgaaatgtacgtcggcgaagaagcaccagaaggcgacggatggaaacaagacgaagatgtcttggatacttggttcagttctgccctctggccattctcaactatgggctggccggatgtcgactcagaagacttcaaacgttacttcccaacttcaaccttggttacaggttacgacatcatcttcttctgggtatctcgtatgatcttccaatcattggaattcacaggacgccaaccattccaaaacgttctgattcacggtctcattcgtgacgagcaaggacgcaagatgtctaagtcactcggtaacgggattgacccaatggatgttattgagaaatacggtgctgatgcccttcgttggttcctttcaaacggttctgcaccaggtcaagacgtgcgtttctcttatgagaaaatggatgcgtcttggaacttcattaacaagatttggaacatctctcgttacatcctcatgaataatgaaggattgaccttggatgtggcgcgtgaaaatgtagctaaagtgtctgctagtcaagcaggtaacgtgacagaccgttggattcttcacaacctcaacgaaactattggaaaagtcactgaaaactttgacaagtttgaattcggtgtggctggtcacatcctctacaacttcatctgggatgagtttgcggactggtatgttgagttgactaaggaagtgctatacagcgacaatgaggacgaaaaagtcattactcgttcggttcttctttacaccttggatcaaatcttgcgtctccttcacccaatcatgccattcgtgactgaggaaatctacggtcaaatctctgaaggaacaatcgtgactgcggaatacccagtggttcgtccagagtttgaaaacgaagaagcagcagccggcgttgaagctcttaaagatgtgattcgctccgttcgtaactcacgtgcagaagtgaatgtagcgccaagtaaaccaatcactatcttgatcaagacaagcgacagcaggctcgatgctttctttaatgataatgtcaactacatcaaacgtttcacaaacccagaacacttggaaattgcagcagatgtcgaagtgcctgacttggttatgtccagcatcatcacaggcgcagaaatctacttgccacttgctgaccttcttaatgttgaagaagaattggctcgtcttgaaaaagaattagccaaatggcaaaaagaactggatatggtcggtaagaagctctctaacgaacgtttcgtagccaatgccaaaccagaagtcgtccaaaaagaacgcgacaaacaagccgactaccaagccaaatacgacgcgaccgtagcacgtattgatgagatgaagaagttggtgaaataaacctagaaacacggcggtatgccgtgtttttttggtataatgaaatcaatatctattgatggagaaagttatgtctaaacaccctcactatgaattgttaaacttgattggctatggtcttgctaagtttgatgatacttttataaaggaatttcaatgctctagtaaatccgagttttatcgttacatagtttctttaggcattgcagaaacaacgggtgtagtcaaaaatagaatggatttattcgacccctattttgataacaatcgaaaaggttggtggcaaaaagctgaagtctaccgttttcgaaaagatttaattgacacgatgtttggaaatgaggatgttcacagttttgcagaaatagtcaaaatgctgcttgcaagtgaagggaagaaaacaggcataaccatcgttgaaaagccaatcattcgaacgaaattcaaacgcctacaagaaactggaatggaagcagagaattatttcatacaccattttgataaggaagaaaaatttcaaggtggccaattgactgatgcccgtctttatggtgatggatatgatttccaagtagatgttcaagaacattcataccttgctgaggttaaaggtatccgaaaacctaaaggacgtattcgtttgacctccaaagaatttgagaaagctaaggactatcaatcagattttattctatctctagtcactaatctcgacgatattccaagattggtattgattgataacccacttaaccattttgaatttgaaaaaaatgttattaaaaatgaagtcgttgaatatagaagtttggaagatttatattaataaatagtgcggtgtttattactatcacgtcgactggcaaaagcttattttagactaaatggcgtataaaaatcttttcatactcttaaaaatatagggagatgcataactagaaaattgggaatgcttctctttttgaccaaaaacaccacctcctagtcttaggggtggtgttatgctttagaccattttccagaaataatcgatgatataggtgagaccgtaggtgtagatgacaagggtgataggtttgcagaggatgatgatggtcatgtagcgtttgaaggtcatattggtcagacctgccagcatacagatgaagtcagcgggactaaccggccagatcatcatgaagataaagaagcgatcgaaccgcttgccttcattgagccagccaatgtacttgtcataggtcttctggctgaccatggattggacgaacttaggcccgtacattctcgcaaggtggaagataatggcacagccaatcacgatcccgatgtagttgtagatggtcccaatgatgtggccgtagatgaaaacacctgctacagatgtcagggcgccgggaataatagggaccactgtctgaaggatctgaagaaagataaagagaggtggtccaaaaatacctgcttgcaaaataaaggcagacagagtttccttggattgaaggatgccagaaaagtaggcccagatacaaaaggccaaggtcccaagagctccaatgatggaggaccaattgatgattttttgaaggagaggagagacctcttttaagcttgtttgtttcataaaaaattccgagttctttttcttctactataccatgtttttggaagtttgtaaggattttgtctattttttgagtagtgaaagcgacctgattggagtctgtcgctgttttagtcgtgaagcgggtgcaaaatgggcctttttatgctacaatgaaaggagtataaaaaatggagaaaaacgtgtcaatcgaaaattacaaaccagattttgcggtggaagcagcctatgatctcaccgttgcagacttgaaaaaacagggtatcaaggcggtccttgtggatttggataataccttgattgcttggaataatccggatgggactcccgaaatgcgccagtggttgcacgaccttcgtgatggagggattcgagttatcgtggtatctaataatagtcccaaacgggtcaagcgcgctgttgagaaatttgatattgactatgaagcctggtcgcttaagccctttacttttgggattgatcgtgccctcaaacgtttccactatgagaaaaatgaagtggtcatggttggggatcaactgatgacggatattcgggctgcccatcgagcaggtattcgttcgattttggtcaaacctttggttgagcatgactcgatcaagacccagatcaaccgggcgcgtgaacgccgtgttatgaagcaaatggccgagaaatatggtccgattgtatacaaaaaaggaatttaagaatggaagaattattctgtattggctgtggagcccccattcagacagaaaacaaagaggggctaggctatactccccaatcagctcttgaaaagggcttggaaacaggcgaggtttattgccaacgctgtttccgtctgcgtcactacaatgaaatcacagatgtgcatctgacagatgatgatttcctaaagctccttcacgaagtaggggatagtaatgctctcgtggtcaatgtagtcgatatttttgactttaatggctccgtcattcctggcctaccacgctttgtagcaggaaatgatgtcctcttggtcggaaacaaaaaagacattttgcccaagtctgtcaaggatagcaaggtgacccattggttgatggagcgggcccacgaagaaggtatgcgtcctgtcgatgtggtcctcacctctgctcaaaacaagagtgctatcaaggacttgatggaaaagatcgagcagtaccgcaagggacgtgacgtctacgtggtgggtgtgaccaacgttgggaaatcgaccctcatcaatgcgattatccaagaaattactggagataaggatatcatcacgacctctcgcttcccagggacgacactggacaagatcgaaatcccactggacgatggatcctacatctacgatacaccagggattattcatcgccaccagatggctcactatttgacagctaaaaacctcaagtatgtcagccctaaaaaggaaatcaagcccaagacttatcagctcaatccagagcaaaccctcttcttgggtggtctgggacgttttgactttatcaagggagaaaagcaaggtttcactgccttctttgacaacgaactcaagcttcacagaaccaagctcgaaggagcgaccgccttttataacaagcatgtcggtggcttactaactcctcctaatagcaaggaaaaagaagaattcccgcctttgatttcccatgagtttaccatcaaggacaagacagacctggtcatctcaggactcggctggatccgcgtcaatggagaagccaaagtagccgtctgggcaccagaaggcgtcgccgtcgtcacccgcaaagctattatttaaaaatttgtaatagaatgaattgaagagcgcacgaagtgagctcataaagagatcgttattgccgtggtgtagttgccaatcgatcgattggcaagggcaaaatggagaccaaggctccattttgaggtgaggaaatccatttttcaaagatgagatctttgaaaaattagttccggccgtccccaccacttaaaataacgatcaaaaaaggaagtaaaaatatgacattaacatctaaacaacgggctttcctcaatagccaagcccacagcctcaaacccattatccaaatcgggaaaaatgggctcaatgaccaaatcaaaaccagtgtgcgccaagcgctagatgcgcgcgaactgatcaaggtgacccttcttcaaaatacggatgagaacatccatgaagtagcagaaatcttagaagaagaaatcggtgtggaaacggtccaaaagattggtcggattctcatcttgttcaaacaatcgagcaaaaaagaaaatcgtaaaatttcagcgaaggtaaaagaaatttaggacatcgaggagagcaaacctatggcaattgaactattgactccctttaccaaggtagagttagagccagagatcaaagacaagaaacgcaaacaagttggtattttgggtggaaatttcaatccggtccacaatgcccatttggtcgttgcggatcaagtgcgccaacaattagggttagataaggtgctcttgatgcctgagtatgagccaccgcatgtcgatgccaaggggacgattgcagagcaccatcgccttaagatgctggaattagctattgaagggattgaaggtctggagatcgagacgattgaactcgagcggaaagggatttcctatacctacgacaccatgctcttgctcaatgaacgggatccagacacagattattacttcatcattggtgcagatatggttgattatttacccaaatggcaccgcatcgatgaattggtggagattgtacaatttgtcggggtacagcgaccacgctataaggcagggacttcttatccggtgatctgggtggatgttcctctcatggacatctcctctagtatggtgcgtgattttgtagccaaaggccggacgccgaattttatgttgccaaaaccagtcttggactatatcaagaaagaaggattgtatcaatgacctatgaaaactatctaggcttttctcgtgaggtcttgcttgaaaaaatgcgtcaaattctgccagaaaagcggctaacccactgtttaggggttgagaaggctgcgcgtgacttggccaaacgctatggggctgatgaagagcaggctggtctagcaggtttgttacatgactacgccaagaaattatcagatcaggaatttctggacttgatcgatcgctatgagctggatccagcattaaaaaactggggcaacaatgtctggcatgggatggtcgggatttacaagatccaagaagacctcggactgacagatccagccattcttcgcagtattgagattcacaccgtggggagtggacagatgtcgatcttagataagattgtctatgtggctgattacattgagcacaaccgggcctttccgggggtagatcaggcgcgtgacattgcccaagtctccttggatcgtgccgtggcctatgagacggctcgcacagtcgaacacctggctcaccaaggattgccgatttatccccaaacccttgaaacctacaatgcctttgtgaagtatttgaaagaggagcaatgagtgaaaacagcttttatcattattgatgtacaaaatatcttagtggaaacaggctttgagacagaaaatctcctagagaagatcgcttatttgcaagatcaggctagaaaacagcaggttgaaatcatctatatacagcatattgaaacgccagaggctttaacgtcggaagattggcaattatcgcccctgttgaaaagacaggagaatgaaaaggtatttcagaagcaatacaatagcatgtttaaggagacaggattaaaagaatacttggatcaacaaggaattcaacaactggtcctgtgtggcatgcagaccgaatattgtgtcgatacatccgtcaaagtggggtttgaatacggttataagttggttattccagaaggagctgtcacaacctttgatggagaggatattccggcagaaacgcttaatgaattttatgaaaatatttgggcagaacgttttgcggatgtcttagattacaaatcaattttttaaggaaagaggattacatgaaagaaaaagaactacttgaactagttgtcaaagcagcagatgaaaaacgcgcggaagacattgtggctttggatgttcaaagcttgactagtgtgacagactactttgtcatcgcaagctctatgaacagccgccaattggaggcgatcgctgaaaacattcgcgagaaggtcatcgaagctggtggcaatgccagccacgtcgaaggtgattcagctggaggttgggtccttcttgacttaggtggtgtggtggtccatgtcttttcagaagaaatgcgtgcccactataacctagaaaagctatggcacgaagcaagtgctgtcgatctttcagcagccctagcataagcaggtgaactcagttggtagcaactgagttttgttggttaaattgaaattctatggaaagaaaggatggggccccgtgtttagttaatttgataactgaacacgagctaaaagctgtgagaaaaagataaacttcctttgtatctgaggatacggcagaaagtttcctattttctctatgcttttaacgctctttgtatcttgatttatggcgacttatgaaacgtttgcggcggtctacgatgcggtcatggatgatagtctgtatgatttgtggacggatttttctctccggcatctccctaaaagcaaggaccggaaaaaattgctagaattggcttgtgggacagggattcagtctgtccgcttttctcaagctgggtttgatgtgacagggttagacctgagtgctgacatgctgaaaattgctgaaaaaagagctgcttcagccaagcaaaagattgattttatcgagggcaatatgctggacctgtcgcaagcaggaacttatgactttgtaacctgctactcggattctatctgctacatgcaggacgaggtagaagtaggggatgtctttaaagaagtgtataatgccctcaatgaggacggagtttttatctttgatgtccattcgacctatcagacggatgaggttttcccaggctattcctaccacgagaatgccgaagactttgccatgctctgggatacctatgaggatgcagcccctcactcgatcgtccatgagctgaccttctttgtccaagaagaggatggcagctttagtcgccacgatgaagttcatgaggaacgcacctatgaagttttaacatatgacatcttattggagcaggctggctttaaatctttcaaattgtatgcagactttgaggacaaagagccaacaaagaccagcaaacgttggttttttgtagcacagaagtagggcagcatgacagttacaggaattattgcagaatttaatccttttcacaatggacacaagtacctgctggaacaggcagaaggggtgaagattgtggtcatgtctgggaattttgttcaacgtggcgggcctgccattgtagacaagtggacacgggctcagatggctttggaaaatggagcggatctggtggtcgagctcccctttctcgtggctgttcaatcggcggatcattttgctaagggagcggtagaaatcttatcccgtctaggaatcgaccaattgacctttgggacagaagaagtcttagattaccaagcgattgcgacagtctactcggagaatgaggcggaaatggaagctttcttgcgaagccttcctgacgatttatcctatccacaaaagacccaaaaaatgtgggaaacctttgctggagtggagttcacaggagatactcccaatcatatcctgggtttggcctatgccaaggcttgtgctgggaagggaattgcgctcaagtccgtccagcgccagggagcaggctaccattcagaggaaaaagaagtggcctatgcttctgcgactagtctacgcctacacaaggaagatcaggactttgtcgctaaattcatgcccaatagtcaactctttcagtcggctccacaggtgtcttgggagaattatgaccaactgctccgttatcaaatcctaacccatccagatctgacacagatttttcaagtcaatgaagaagtggccaatcggataaaggatgcggttcgaggtgctagctctgtggaagagttggtggagaaagtcgcaaccaagcgctataccaaagctcgtgtccgccgcatcttgacctacatcttggtaggggcgatggatcaagctcttcccgacgccattcatgtcttaggattttccgcaaagggacaagctcatctcaaaggcttgaaaaaatcagtaggaatcgtgactcgaatcggtaaggaaccttgggatagtttgacccagcaagcggatcaggtgtatcagctaggccatccccaattgcgagatcagatctggggtcgggtgccagtgagagtggaagaataaacagtctgacgtaaattttctctgtccacattcacgtaaggcaagaagtttatgatgtaaggaaatagtgtttatctactgtctaaaaattcctttagacagtagatttttttaccaaatttagaaactttttacgaataattaagtgaagagggaaaaacttgtacaagttcctgacgagtttttctttttcatgtataataatagaaaagaggtagaatgaggtatggtcatggaagcagtcgtttattcaacattccgcaatcatttgaaggattatatgaagaaggtgaatgatgagtttgagcctttgacggtcgtgaataagaatccagacgaagatattgtggtcatctctaagagcgagtgggacagcctacaagaaaccctgagactagctcagaacaaggaattgtcagataaggtcttgcggggcatggcagaagtccgagctggtcaggttcaactccatgagattgaggggtaacggatgttactcaagtttacagaagatgcctggaaggattattgttactggcaaagtcaggacaaaaaaacactgaagcgaatcaatacccttatcaaagagatccaaagggacccatttgcagggattggtaagcctgagcccttgaaatatgactttcaaggagcatggtcaagacggattgatgcagagaatcgcctgatttatatgctagatgagtcaggtgtcgctcttctctcttttaaagatcattattaagtctttaaaagaggatctttttgatagttaggatagctatttaaaattcccaactcgaagaaaattcctataaaatcccctttctaaaaatagaaaaatctagtctaacttcgatgatttgtgatataatgttaaagattgaaaataatttgaaaaaatttaaggagaatcctcatgggacgtaaatgggccaatattgttgccaagaaaactgccaaagatggtgccaactcaaaagtgtatgccaaatttggtgtggagatctatgtagctgctaaaaagggtgaaccagatccagaactaaatactgctttgagattcgttattgaccgtgctaaacaagcgcaagtgccaaaacacgttattgataaagcgatcgataaggcaaaaggaaatacagacgaaacctttacagaaggacgttacgaagggtttgggccaaatggttcgatgttgatcgttgataccttgacgtcaaacgtcaaccgtacagctgccaatgtccgtgctgcctttggtaaaaacggtggtaacatgggagcttcaggttctgtatcttatctctttgacaacaaaggtgttatcgtctttgctggtgatgatgccgatgccatctttgagcttttgcttgaagcagatgtggatgtagatgatgtcgaagcagaagaaggaacgatcacagtctacactgctccaactgatcttcacaaagcaatcgttgctttgcgtgaatcaggtgtcgaagaattccaagtaacagaattggaaatgattcctcaatcagaagttgagttgtcaggtgaagatttggaaacatttgaaaaactttacagcgttcttgaagacgacgaggacgtacaaaaaatctacacaaacgtagatggattctaatcactcgtaaggactgtagtgaatcccataaattaagaaaaaggatagcttctcagatcaagctatcctttttctctgtctgatgaggatctatcttttgtaagtgatgtcctgtataagcgtaaatacgggtcaggggtgattgggagagtgtggaaaccttaaaatagaaatagtggtctcgatgatctcgacttttggtgtggtgaagacgaaagtagtttcgctggcctgctgccatagagtggaggatatcgtcttctaaaaatacaagtggcgtagaagtagccgcccacttgtaaaagtctgtctcaaattggtggtaattctctgaaaaataatcaaattgtaattcgtgtttagtctgaatcggtttcatagggtgtttcctcagattcaataaaaatgatagaggtcagaaggagccggtggtagtggccatcgcttttgagaagaagctcagaagcagataaggtgtgaatcgaacctgcataggttgcaaattgattcccctctagagtcgtgatcgagatcgtcgtttgttgttggaaggcctgctccaggagctggatctgctcagaaagaggaagaacgttgagttgactgcggtcaatttcttttgtatgcagggcagttgtgtgctcagataaaaagaagccagcccatttggccatgccacggtcttgaaattcgcgggcggattgataagggagataagaacggtcgatcatgttaatccatctaagcctcctgcggaatgtccgccagttagtttactgcgtgcaatggcgcgtgagttttctagtagtgaggagcctttctgaagagaggtaaagccaaattgatcccgaatgcggtcaatggtctgctggagtttttcctctttttctagggctatcggatcatcaaagagagaaaaaagttggagagattcctcgacaagttcgccataaaaaacaccaatctgccgaatggctccgccttcgtacttggagcgaaagagtcgcagaacagtatcggataaaaccttggtggattgcgtgggttcaatcttttgctggcaatgaatggacggaagcccctcgattttggagtaggaggcatgaatggagactagctgggtcttcttttttttccgtcgcaagcggatagccacctgttcagccatctcacgaaacaccagttcaatgtctgtttgtaggtggtagtcatagggcaatatttgagaattgccaatgcctcgtgacttcggacgataaggtttgtgtacattgctttcatcaatgccatgagcatggaaccaaagttgaagccccatgactccgaattctttctttaagagatcaggatgagcctgagccagttctttaatcgacgtgatcccgatcccttgcaatcgtttttcagtgcgacgtccaatgccccaaaaatcagtgagctggggcagtttccagaccttgctttctacatcttcataagaccaattggagcgcatatttcgacaatgcttggcttcattgtccagggctagcttggcaagaaggggattggcattgctgaggccgatggtagagtagattccagtttcctgccagattcttttttggatcctggcagaaaggaggtccagtttttcctttcgcgagagggaggaatctggaataaaataatttaaggaagaagtcagatcgataaagccttcgtcaatcgagtaagggaaaatatcatcgggtgccgcaaattcctgaaaaaccttctgaatctccatattgacctgaatgtaggcattcatgcgtggcggcacaatcagggtcctcttggcccaggattcaatggatgcaataaagcctggatccgtcggcaatccttgtttttttgcgacgtagctattgaattttctggtcttgagatcaaaaggcaggtcgtagctccggctcacattattcttgccaaagacttgtttgaaaacgggagagctggccaaaatcagaccagcagaattgtcgctccggctcatgacgcaaagagaagtggtcaagggattgagccctagacggacacattcacaactggcataaaaacttttcatatccacaaaagcaatatcagaatgaggctcacgtgaataatcaaatagcatatttatacctcaagcggaagaaaatgcccgaccacaatgccgacgatttttggctcgtcttcatagggagcaaataaatcgtcgtaatcagggttgatggattctaagcgcaaaccttccgcttctcgatagactttcttgatgtaagtttttccattccagatgagggcgtagacagccccatcgtagtcaaaaccagtctgtttcatgagggcaacagagccattgggatagagaggttccatcgaatctccggatacccaagaggcaaagtcgtgttggatctcttggtcaaaataaacggtctcgtagtcggtctcgttgtcataaaaggtatgtcccaaaccagctgccaactcaatcgaaagaaccttataagctgttaaggaaacaactttttgttgctgttccaataactggctggccaactggtcgactttcttttgatgaggtggggttaataaagggtaggtgtagagtgcggagtctttgttaataaagtagtcctctttaacggagaggcgcttggccaacctcctgagatttttttcgtgtggctccgccaagccattctcccaactggagtaagtcttgcgagaaatcttgagatcctcgtagacatctgcttgggtcaagcctttttccaggcgtctttcttttagtttttttgcatcaaacatgtcagctctcctatgtaacgttttaaaagttacatatagtttatcaaaaatgaatcctttttgcaagagaaaaattcagttgaaaacgaatgaaaagacttgattttgattgaaaaaggagtataatcaattctaaaatgtctataaatgaggaactatatgaaaaaaagttttatccaccaacaaaaagaaatttcgtttgttaaaacgacgtttacacaatatttaaaagataaattggacatcattgaagtccaagggccaattttgagcaaggtcggagacgggatgcaggataacctttctgggattgaacacccagtatctgtaaaggtccttcaaattcctgatgagacttatgaagtcgtgcattcactcgcaaaatggaaacgccacaccttggcgcgttttgggtttggcgaaggcgaaggtctctttgtccacatgaaggcccttcgtccagatgaagattcactagacgccattcactccgtttatgtagaccaatgggactgggaaaaagtcatcccaaatggtcaacgcaatatcgcctaccttaaagaaacggttgaaaagatctacaaggcaattcgcttaacagaactagcagtagaagcgcgatatgatattgaatcagttcttccaaaacaaattaccttcgttcacacagaagaattggtggaacgctatccagatttaactccaaaagagcgtgaaaatgctattgccaaagaattcggagccgttttcttgatcgggattggtggagagcttgcagatggcaagccacacgatggacgcgcacctgactacgatgactggacaacggaatctgaaaatggctacaagggcttgaatggcgatatccttgtatggaatgatgtcctaggttcagcctttgagttgtcttcaatggggatccgtgtcgatgaggaaacgcttcgtcgtcaaattgcgattacaggagatcaagatcgtctccaattagagtggcacaaggccctgttaaatggtctcttcccactcacaattggtggagggatcgggcaatctcgtttggctatgttcttacttcgtaagaaacatatcggtgaagtccaaaccagtgtctggcctcaatctgtccgtgatgaatatgaaaatatcctataatggatgaaagagtcgagcagagagctcggctcttttaattgtcgcttaaccatatcaaatcgcaattttctgattttttttggtataatggtccctatgaaaatagtatctggaacttatgggggacgtcccctcaaaacacttgaaggaaaaacaaccaggccgacttctgataaggtcagaggggccatgttcaatatgattggtccttactttgatggtggaagagtactagatctctatgctggaagcggtggcctctctattgaggcagtctctcgaggcatgtcagaggcggttctagtggaaagagatcgtcgagcgcaggagattgtggcagctaatattgctatgaccaaggaaaaggaacggtttcaactactaaaaatggaggccaagcaagccttggggcttctaacgggcacctttgatctggttttcttagacccgccttatgccaaggaagagattgtccgcgatatcgaaaccttgtgcgagcgccatctcttatcagaaaacatcatgattgtgtgcgaaacagataaacatgtagaacttcctgaggaaatcggacaggtgggaatttggaaagaaaaaatctatggaattagtaaggtaacagtatatgtcagatagaactggattgtttacaggatcgtttgatccgattaccattgggcatgtgcaattgatcgagcgggcgagccgcttgtttgaccgtgtctatgtcggaattttttataatccggaaaaagtcggactcttttccattgagcagcgcgtgcgcatggtggaaggggccttggctcatttggaaaatattgaaattgtgacgtcgacccaagagttggctgtgacagtggcacgtaatcttggtgtggtgaccttgatccggggattgcgcaatgcacaggatctggtttacgaagccaatatggattattttaaccaccagttggcacctgaattggagactatttatctctatgcccagcctccttaccaggccattagttccacccgtattcgagagttgctggcttttcagcaggatatctcaccgtatgtcccagagagtgtaatggaggaaattaacgatgacacaagcgaataaaccaagcttgacccctaaaaagaaaaaaggacggttgaaagaataccgatggccgattgcaggagttcttttcttgcttctcttgctagctgcttttgtgattcgccttccctattatattgaaatgccaggaacggcagaagatattcgatccgtcatgacagtggatggaaaagcggataccaagtcaggaacctatgattttgtaaccgtagcagtgaaagaggcaactccggctgatttgatctatgcttgggcgacaccttttacagatatctactctgccaaggatatgaccggtggtagttcgagccaagaattcacgcgcatcaaccaattctatatggaaacctcgcaaaatatggccatctaccaaggattgaagacagctggcaaagaaacccagatggactttctaggagtctatgtcatgcaggtggcagatgactcgacctttaaaggaatcttgaatattgcggatactgtaaccggggtgaatggtaagacctttaagagctccaaagaattgattgactatgttggttctcaaaaaattggcgatcccgtttcggtgacctacattgaggatggacaaaccaagactgcggatgggaagatcatcaaattgaccaatgggaaaaacggaattgggattagcctgatcgaccggactgaagccaaaggcgatgttcctgtccagtttgcgacagctggcatcggtggcccaagtgccggtatgatgtttagcctagccatctacactcaagtggctgatccagatcttcgtcagggacgccatattgctgggacaggaaccattaaccaggatggaacggttggcgatatcggtgggattgacaagaaagtcgttgcagccgataaagaaggagcagaaatcttctttgcccctaataaccctgtttccaaagaagaaaagaaagccaatcccaaggctaaatcaaactacgaaaccgctaaagatgcagcaaaacaaatccattcgaagatgaaaattgtgcccgtcaaaacccttcaagacgctattgattatttgaaaaagaagtagaagtatcttgctagattagtctcatacttgaaagtatgagctgatgttggcagatagaaagattcatcttctaatcaaattcaagtttttgcttatcaatctctctatttttagagggattttttctttatactggtatcagaaagaaagggaggtagtgaaatgattcaaaccagtttgttttccatttcagtattcttagcgggagttctatcctttttctccccgtgtattttgccactgatgccagtctatgtagggattctattggattctgaacgtgtgaaaactgttcggatttttggaagagatatttcttggtacggcttggtgaagacgctttgttttatcgcaggtctatcaactgttttcctgattctaggatacggtgcaggggcccttggtcaggtactctatgctccctggttccgttgcctactaggagggattgtcatcttattgggaatccatcagatgggcctcatcaatcttcagcaactccaaaaacaaaagagtatccaactgaagaaggacgaaaaacgcaatgaattcttcaatgcttttctgataggggtcaccttcagttttggttgggccccttgtgtcggaccagttttgagctctgttttagccattgccgcttctggaggagatggtgcattgcaaggtgctctcctgatgctggtctatacattgggcttggcgctacccttcttagtcttggctctagcttctagctgggttctacaacattttgctaaactcaagccccatatgggaaccttgaaaaaaattggtggtgccctcatcatcttgatgggcatcttgctgatgctaggaaatcttaatagcctcgcatccctgtttcactaatcttgaatgattaaaggagaaaaatcatgaaaaaaattcttacacttaccattgctacgcttagccttgtcactttagcagcttgttctggacaaaaatcggattcagatatgaaaaaaacggacgatagtagtatgatgaagaaggacgatatgaagaaggatgacatgaaggattcgtccatgtccgatgataaaatgaaaaaagaagacatgaaagattcatctatgatgtctgacagcagttctgaaatgaaggatgatatgaaaaaagatgagatgaaatccagcgattcagaaatgaaagatgaaaagagtggatcatctgatatgaaatcagacaactaatgaaagaagggagaggtcatctgaggatgactcagattgaagacaacgtcatcttagaaactttccttaagtgagtacggacgtcagcgaacttcgaagaagttccatgacttagttttggacctgaagttccaaaactcccgggtgttagaaacactaatgtttctaacacttttctcacggcggaaagtttcagtgtgtatttcaatgtacctaatatgctttttcattttatgtttatagcactacttaggtttgttttatgttaaaaaacagtttgtctgcattctaagtcatctgagaatgattttcttccgattttgaagaggtgataaagatgaaaaaattagctttagtagctgcaggattcttgtgtactggatttttgggggcttgctctaaccaaggaatggccacttccaccaaagacatgagtcaacaaacagctaaggctggggataggcaaccatctggcaagaaagtgaaggatgttagcctgcaaggagtggatggcaagacctaccgattatccgattacaaagggaagaaagtttacctcaaattttgggcttcctggtgctcaatctgtctttcaacattaggcgacacaaatgatttagcaaaggcagaggagggtaaggattatgtggtcttatccgttgtagctccaacctttaatggtgaaaaatcggaagcagatttcaaaaactggtaccagtctttggattacaaggatttcccagtcttgatggacagtaagggcgacttgctcaaagagtatgggattcgctcttatccatctgctctctttattgcgagcgatggaactctcgctaagacccatatcggttatatgagcaaggaagacatcgtccagactctaaaagaaatgaagtaaggaggacataaaatggaaacaaaatggaaactcatttccattcttttagtggggctattttgttttggaatctttttccttatcaaaggatccatggccttggatacatcagatgcgacgactgagcagatcaaaaaagcgtccatgagtcagacaccagtagcaaacaaaaagaaggaagaaaaagtcaacccagaagaccaacgagaaatctatctagctggtggttgcttctggggcgtagaggaatatttctcccgtgttccaggtgtgatcgatgctgtatcaggttacgccaatgggaagggagatacaaccaagtatgaattggtccctcaaacaggccatgctgaaacagttcacatcacttacaatgtcaagcaggtatctctgaaagaattgctcctgcactatttccggattatcgacccaacgtcgaagaatcgtcaaggaaacgatcaaggtactcaataccgaacaggtgtctattatgtctctcaagaagaccttccaaccattaaccaagtctttgatgaagtagcaaagaaatacgacaaaccgttagcagtagaaaaagagccactgatcaatttcatccaggcggaagattaccaccaggattatctaaagaaacatccgaatgggtactgccatattgatgtcaatcaagcttcttatccggtgattgatgctagtcgctactctaaaccgagtgatgaggagatcaaaaagaaattgagcccagaagaatatgcggtaacacaaaaaaatgataccgaacgggccttctccaatcgttactgggatcagtttgatgccggtatttatgtagatgtcgtgaccggtgagccgctcttttcctctaaggataaatttgattctggatgtggttggccaagttttagccgtcccattagtcctgatgtggcgatttataaggaggataagagtttcaatatgactcggacagaagttcggagccgtgtgggaaattcccatctgggtcatgtttttacagatggacccaaggaaaaaggaggccttcgctattgcatcaatagtttgtctattaccttcatacctaaagcagaaatgaaagaaaagggctacggttatttattagactatgtctgagacaattcagtctataatttgctataataagtatagcaaaaacaagtaggtgaaagacatgtacgcgattatgattgtggaagatgaagagttgattcggcagggtctgacttccttagtcaactatgaacagtttggaatgactgtcatcaatcaggcagaaaatgggcgtgaggcttgggagaagtttcaagagcaaccagccgatatccttctaaccgatatcaacatgccacaaatgaatggcttggatctagcccatctcgttaaagagaaatctccgtcttgtcatatcatttttttgacaggttatgatgactttgagtttgcgagaaaagccatcaagttaggtgcggatgattatttgctgaagcctttttcaaaagatgatattgaagagatgttagccaaggtgaaaggaaagctagacaaagagcgaaagaaagcgcaagtcgaagatttggtcagccatggttattcgacagagttggaagaagccattcatgctcgtttagcagattcgcagttaaccctgaaggatttggcctatcaacttggcttcagttcctcttatctaagtgtattgatcaagaaaaaattgggacttcctttccaagaatacctcatccaagagcgaatgaagaaggctcaactcttgcttctcacgacagatttaaagatttatgagatcgccgatcaggttggttttgaagatatgaactatttttctcaacgctttaagcaggttgttggggtgacgccaaggcagtacaaaaaaggagagcatgaatgaaacgatatcccttgctgattcagctggtcctctacttttttctcttcattctcttactttttggtctcatcggtagcctttactatcaaacgagttcagggacgatccgccagctaacggagcggacgacaagaaatagtatcgaccaaagtagtcagtttattacgtcttatctaaaaaaattaaagcagaccacaacggtgcttagcaaggaacaggctgttcaacaatttgcccaagataagagtgcggatcaagaaacggttcagcacttgatgcgaacgatgattgaaacggatccggacttggtctctgcggtcttggtgaccaaggatggacgtctggtagcgacagattccaaaatcagcatgcagacttcctcagacatgatgaatgaaagctggtatcaagaggcgattaaggaaagagccatgccagttttgacgccagctcgaaaggaattcttgacttcggaaaaagaaaaatgggtggtttctattacccaagaagtggttgatcagactggtcaaaatcttggagtagtacgcttggatattggctacgatagccttcaggcttacttggatcacctgcaactagggaaacaaggctttagttttatcattaatcaaaagcatgagtttgtctaccatcctaaaaaaacggtctattcctccagccaagagatgcaggccatgcagccctatattgctgtgacagatggctatgcaaaaggagggcagaattttatctatcaagttccgattccaaatagtgattggaccttgattggagtagcttcacttgaaggacttcagatgcttcagtcgcaactcctatactctttcattggtctaggattactggccttgatcatgtgtttaatagggcttggctttgttctgcgtttgtggatcaaacccttacgagaccttcagaccatcattttgaggattggatcaggagatgctcacgtgagggctgcagccaaaggatctccagaattggtcgacctcgctcaagcttttaatgccatgttggatcaaatcgatcatctcatgcaacaggtaaaggaggaggagcagaacgcacggcgttacgagctgcgggcactttcggctcagattaatccgcattttctctacaataccttggatacgattgtctggatggcggagtttaatgatagtcggcgcgtggtcgacatcactaagtctctggctcaatattttcgactggctctcaaccaaggccaggaacaaatcctactgagagatgaaattgaccatgttcgccagtatcttttcattcaaaaacaacgttatggtgaaaagctcaattatgaaattctagaagatgaacggttgggcgattatcagctacccaaattagtgcttcaacccttagtggaaaatgcgatttaccatggcattaaagagatcgatcggccaggtctcattcgagtgacaactgaagtcagtggagactccgcctgcgtatcgatttttgacaatggacaagggtttgatttatccggatcaacagaccaaacccttcttcgtttaggaggtgttggcttgaaaaatgtggaccaacgattgcatcttcaatttggagaagcctatcatatggagattgattctaaagctaatagctatacgaaaatcacactttatttgcccctttcatctggcgatgaatcttcatagagactgggacaaaagtcctagcctctcaattatttttggattgtcgagcaagacgcagtggttgagtgggctctactacgctgattgcatcagcttttacagccctactcaactgtgcggaggtgggacgacgaaatcgaattctaacgaattaccgatttctgtcccactctctttttgctgtcaaaggaatttcaactcttttctagtcaaatctgacgcaagttatcaaatttatgatagaataaagtgttacagtaaatagattttgatgaaggaacactatgcgaaaagagattgaccctgaattatataattacaataaatttcctggacctgtgtttcgtcaggtaggagaccagatcctttcagaaaacctctcctttgagttgttaaaatatgaaaaggaagcatttgatgcgaccgtttttggtcaacgattttctgagattttaaccaaatttgattacattgttggtgattggagcaatgagcagttgcgcttgcgtggcttctataaggaagaacgcgatgttgcaacgatggataaactaagtcgcttagacgattatttgttagaatattgtagctatggttgtgcttattttgtccttgaaaataaggagcctcatcgtgcttcctttgataagaaatcaccggtcaaaaaagctcaatcagaagaaagagagcctaagaagcgttcgcgcaatcgcaaacaaaaagatcgtttccaaaaacgagaacgcgacaagggacagtcaacgaataactcgaaaaaaacaagaccgtctgctgaaactaaaaaaacaacaaagacgaacaacaaacgtcattttgtgattcgtcaaaaagaggagtaagaaagaatgaaaccatcgatttatagtttaacacgccaagagatgattgattgggcggaagaaaatggcgaaaagaaattccgtgcagcacaaatctgggaatggctctatcgtaaacgtgtccagtctttcgaagaaatgaccaacctttctaaggacttaattgcgaagttaaacgatcaattcgttgtcaacccactcaagcaacggatcgtgcaagagtcagcagatggaacggtcaagtatctttttgaattgccagatggcatgttgattgaaaccgtcttgatgcgtcagcactatggtttatctgtttgtgtaacgactcaggtaggatgcaatatcggttgtaccttctgtgcttcaggtttgatcaaaaaacaacgcgatttgaacaatggggaaatcgtgtctcaaatcatgttggtccaaaaatactttgacgaacggggtcaagatgaacgggtcagccatatcgttgtcatggggatcggagaaccatttgacaactataacaacgtcttgaaatttatccggaccgtcaacgatgataaaggtctagcgattggggctcgtcatattaccgtatcaacttctggtttggcccataaaattcgcgactttgcaaatgaaggggtgcaggtcaatttggcggtgtctctacatgctccaaacaacgacttgcgctctagcatcatgaagatcaaccgggctttcccaattgaaaaattgtttgcagcgattgaatactatatcgaaaccacgaaccgtcgggtgacctttgagtacatcatgttgaatgaagtcaatgatggggttgagcaagccttagagttggcagaattgctcaagaatattaagaaattgtcttatgttaacttgattccttataatcctgtcagtgagcatgaccaatatagccggagtccaaaagaacgggttatggccttctatgataccttgaaaaaacaaggtgtcaactgtgtggtgcgtcaagagcacggtacagatattgatgctgcctgtggccaattgcgttccaatacgatgaaacgggatcgggagaaagcgattgttgaacatgcgcaaccttaaacaagggctgatggatcaaacagaactaacaaagagaggaagaaggctgttacagagtggcagcttcttctattttatcctcttgtgcctgatgtgctttttgcctcaacagccagagccaggtatggaaacaccgggaattcaacattttggtcgcatcgtcgtcctactggttccacttaattcgttgatgaattttggccagatcaccagtgtcatccaactcatcaaggtgattctccaaaacgtagccaatgtctttttgttaagcccgctggtctttcaacttctctggctatggccctggttgcggagtcacaaacgggtcttactctttggctttggtctaagtctatggattgaatctagccaagtgctcttagatcttttgtttgatgccaatcgtgtctttgagctagatgatttgtggaccaataccttaggggcttacctggcctatctaggctttcagtatctccaagcgcgattgctagccaaaaatggggaaatgtaaaatccgaacatttcagtcactttttgaaatttttgttgacaaagtcagaagcgggagctataatagcttcaagacatcagaaaagtagagatttttctcacttccagggagcttgtggtgattgcgaacaagcagtggtgaatcttgaaatgggctgatgcgtttatgatgatgaatttgaaacaataaaaattcggtgagcacaccttatcgtgcaccctgttgttagacaggtcagagatgtaggagaaaaatagcttcctacaattgaggtggcaccgcggtatcgaatcgtcctcacacagatttttctgtgtgaggtttttttatctcaaaggaacccagtgagactgcagctcaaagggccagcgagagaaaaagatcataaacaggattgaagatatagaaaagaggacacaatcatgacagaaacaaaaggctatttcggacaatttggtggatctttcgtaccagaacccattcaaaacttgctcaatcaattagaggaaacctttgaacagtataaaaatgacccagaatttatcgcagaatacaaacattatctgaaagattattctggacgggaaacaccgctctactttgcggaaagtttgacagatcatttaggtggggcgaaaatttatttgaagcgcgaagacttgaaccacctaggttcgcataaattgaataacgttttggggcaaatcctcttggctaagcgcatgggcaaaacacgcgtgattgctgaaacaggagcaggtcaacacggtgtagctacagcagctgcggcagctaaatttggtatggcctgtgatgtctacatgggggcagaagacgtggagcgtcaacgtctcaatgtcttccgcatggaaatgatgggggcaaccgtccatgcggttgaaacaggaaccaagaccttgaaagacgccgttgatgctgcgtttggagcatggatggcagacctcgatgccttttacgttttgggttctgctgttggacctcacccttacccaaccattgtgcatgaattccaaaaagtgatcagcgaagagtctaaacgccaaattttggaaaaagaaggtcgtttgccagactatgtgattgcctgtgtcggtggtggctccaatgccatcggtgccttttctgaatatgtcgcagaagaggaagtcggtttgattggggtagaagcagctggtcatggcttggataccgatcagcacgccgctaccatgaccaaagggactgtaggagttgtcgatggtatgaagacctatgctgtctttggcaaagatggaaaagtagctccagtttactcgatttctgctggtttggactacccaggggttggtccagagcatgctttctttaaagattctggtcgtgttgaatatgtagcggcgacagatgatgaagcagtagaagctcttcttcttctcagcaagacagaagggatccttccagccattgaaagctcacacgcgattgcagaagcggtcaaacgtgctccacaattgaataaagacaagattatcatcatcaacgtttccggacgtggggataaggacgtggctgctattgccgattatttggaagcaaaagctgcaaaataagaagaattatctaaaaaacatcgtataaagcagtaaagcgtgataactgagaaagagacagggaacaaagggaatccggtctctttcttttttgagggcaaagaagagaatgcctaagatggatgcgatctggatgagaatgaggatcttggtagaagaaaagctgagtgagaaggtggcgagtaagagaaaatctcccgcccccattccaataaagaaaaagtgggcaccgatcgcaaggagtaaaaagaccagcatgaggagattactagcggataaaaagaggactaaggcatggagacaacaccagatggccaaggggtattccataaagcgtaggtcatagatggctaaaacagcagatccgagtaacgtcagaagttgaggcagagaaagaaaaccattggcacaggctaagaagatcaggccactccagatctcaaaaaggcagtaccaaaatgggtaggtctgatgacaatagcgacagcgaaaacgatgcagtagttgcgagataatggggatgagatcccaaactccaaggacgtgctggcagtgatcgcaatgactgcgaggagtgagaatggattggtttgggaagcgatcgaccactagtcccaaaaaagaggcgaaacaagtaccgatggtaaaaaaataaaagttgatcatacttatttattcgtaaacaaatcgaaaaatgtcatcatttacttgaaaatcttgtaaagcctttctaaatttgatacaataatgaacatgaaaaacctgtatgatgttcaacaatttttaaaacgttttggaatcatcatttatgtggggaagcgcctctatgacatcgaattgatgaaaattgagcttcaacgtctttatgatgcaggcttgatggagcggctcgattatttagaagccgataccgttttaagaagagagcacaagcaagaattagaatttttgaaaaagagtgaggtagagtgatgggaaatatcattttttggttggttgttttaggaatagttggatggatggtgtttaattatttccgcatccgtaaagctgctaaatttgtggacaatgctgcttttgaagagttgattcgtaaagggcagttgattgacttgcgagagccagttgagtttcatgcaaagcatattttaggagcgcgcaacattccttctactcagttgaagttgagccttgcggccttgcgcaaagacaaaccgattttgctctatgagaatagccgtagttcgcgtgtcaccaatgcggctctctatctcaagaaacagggctatacagacatttatgtcttgtcttatggtcttgattcttggaatgggaaagtgaaaaaagacgcttaataaaagagagtgggacagaaatcggtcattcgttagaattcgatttcgtcgtcccacctccgcacagttgagtagggttgtaaaaactgatgaaatcagcgtagtagggcccactcaatgcacgacaatccaaaaacaattaagaggctaggacttttgtcccagcctctttttatctcgttttttcaagggaatctttgacccaggtgagctccacttcattcaaaggccggctttcgccaggggctaactgaggatccaaggtgaagggaccaaaagacaagcgttttaaggtcattactttgacgccaatggctaagaacatctttttcacttggtggtattttccttctgagattcggacctgggccttgctgtagctagggctactttctagaatggttaaggaagcaggcttacagatggggccatctttgaatgaaatcccattctgaaattgctcgatgtgggctgcatagagcggtccattgacttcaacttgataagttttatccacatgatattgaggatgtagaagttgaaaaccaaggggcccattatctgtgatgaggagcagaccactggtatcgcgatcgaggcgaccaagcggataaagatctggatattcttgttggggatctaccagatcgattactgttggatgctgggcatctcttttggcagtcacggctccaattggtttatggagcatgtagtagtggtgacgcggttcctgaatgagccgttcccctatttgaatctcttggagtccagggtcgatgttttgtgacagttttttagctggtaggtgatcgaccaagatttgccttcgggccagaagttgtttgatgtctttgcgagcgtaatgatggtctgccatcaattgatctaatctcatgggagcctctttttctgaaattcttatcatcagtgtatcatgaaatgaaaaggaaatcgagtcggagaaaagaaatgaggatgaaaacatttacaactagctgaactgtgttttttaaacgggactgtggtataattgttcagttagaaatattatttaaaattatatagaggaaatcatgacaaaattaagagaagatattcgtaacgttgcgatcattgcccacgttgaccatggtaaaacaaccttggtagacgaattgttgaaacaatcgcacaccttggatgaacgtaaagaattgcaagaacgtgcaatggactcaaacgatcttgaaaaagaacgtgggattaccattcttgctaaaaatacagccgttgcttataacggaactcggatcaatatcatggacacaccaggacacgcggacttcggtggagaagtggaacggatcatgaaaatggttgacggggttgtattggtcgtagatgcctacgaaggaactatgcctcagactcgtttcgtattgaaaaaagccttggaacaagaccttgtgccgatcgttgtagttaataaaatcgataagccatctgctcgtccagcagaagtagtagacgaagtcttggaactcttcatcgagctaggtgcggatgatgaccagcttgacttcccagttgtttatgcatcagcgatcaacggaacatcatccttgtcagatgatccagcagatcaagaaaaaactatggcaccgatctttgataccattattgatcacatcccagctccagttgataactcagatgagccccttcaattccaagtgtctcttcttgactacaatgacttcgttggtcgtatcggtatcggacgtgtcttccgtggtacagttaaggttggggaccaagttaccctttctaaactggatggtacaactaaaaacttccgtgtgaccaaactctttggtttctttggtttggaacgtcgcgagattcaagaagctaaagctggtgacttgatcgctatttctggtatggaagatatcttcgttggagaaaccatcacaccaactgacgcagtagaagcacttccaatccttcacatcgatgagccaacccttcaaatgaccttcttggtcaacaactcaccatttgcaggtcgggaagggaaatgggtgacctctcgtaaggtcgaagaacgcttgcaagcagaattgcaaacagacgtctctcttcgtgttgacccgacggactcacctgataaatggacagtttcaggacgtggggaattgcacttgtctatcttgattgaaaccatgcgtcgtgaaggatacgaattgcaagtatctcgtccagaagttatcatcaaggaaattgatggtgtcaaatgtgaaccatttgagcgcgtacaaatcgacacaccagaagaataccaaggatctgttatccaaagcctttctgaacgtaaaggtgaaatgttggatatggtcgcaactggtaacggtcaaactcgtttggtcttccttgttccagcgcgtgggttgattggatactcaacagagttcttgtcaatgacacgtggttacggaatcatgaaccacacctttgaccaatacttgccagtgattccaggagaaattggtggacgtcaccgtggtgctcttgtttccatcgataacggaaaagcaacgacatactcgatcatgtctattgaagaacgtggtacgatctttgtcaatccaggtacagaagtttacgaaggaatgatcattggggaaaactctcgtgagaacgacttgactgtcaacattacgaaagcaaaacaaatgaccaacgtccgttcagctaccaaggaccaaacagcggttatcaagactcctcgtatcttgaccttggaagaatctcttgagttcttgaacgacgatgagtacatggaagtaacacctgaatctatccgtttgcgtaaacagatcttgaataaagcagaacgcgaaaaagcaaataaaaagaaaaaatcagcagctgctgaataatacgaaaagaaaggagaaacaaaatggtctattttatcttagggattttgattctccttttttacctttttatgaccccaaagagtattcgtggtaccttaaacagtgtcacaatggtggtcttgatcgtctcttttatcgttcttgcttgtctagccatttttcagatattccaactaccgtccgagttttttgtcggtgcctttctagcctttgttggctacctggctttggtagatatttccaaaatgacgaccaaacagaaaaaataaacggtgacgtgatttttaaagccctttgggctttttaattttgctaaaaaaaggtaaaatagagagtgataaaaatggagcgaagaaatcatgaaatttgtgaaacaatttgaaaataaaaaggttcttgtattaggtttggctaagtcaggcgagtcagctgcccgtttgttggatcgcttaggagcgattgtgaccgtcaatgatggcaaaccttttgaagaaaatccagcagcacaaagtttactggaagaagggattaaagttgtgacaggaggtcaccctctggagttgttggatgaagactttgcagtcatggtcaaaaatccaggaatcccttatacgaatccgatggtcgaaaaagcgcttgaaaagggcattccagtcctcactgaagtggaattggcctatctgatttcggatgcgccaattattgggattacaggatcaaacggaaaaacgacgacgacaaccatgatcggggaagtcttgacggctgctggccaaggtggtctattgtctgggaatatcggctttccagccagccaagtcgcacaaacagcgacagaaaaagaagttctggtcatggaattgtcttctttccaattgatgggcattgaagccttccatccagagattgcagtgattaccaacctcatgccaacccatatcgactaccatggttcttttgaaaattatgtagctgccaaatggaatcttcaaaagaatatgacagaaaaagatgtcattgtgttaaacttcaaccaagacctggctaaggaactggctacaaaaaccaaggcaagggtccttccattttctacaatcgaaaaagtggacggtgcttatttggaagatggacttctcaagtttaagggagaagctgtcatgcgtgcggatgaactgggtgttccaggaagccacaatgtagaaaatgccttggcaacgattgctgttgcaaaagtccggggagtagagaatgaggtcattaaagaaaccttgtcagccttcgggggtgtaaaacaccgtctacaatatgtggatgagattcaaggtgtcaaattctacaatgacagtaaatcgaccaatattttagcgacacaaaaagctctttctggttttgataacagcaaggttatcttgattgcaggagggctcgatcgtggcaatgaatttgatgaattggtacctcacattgctggtctaaaggaaatggtgattctcggggaatcagctccacgagtgaaacgcgcagccgataaagcaggcgtcccttatgtcgatgcgacagatgtggcagatgctgcaaagaaagccttcgacttggctagccctggagatgttgtgctcttaagtcctgccaatgccagctgggatatgtatccgaattttgaagtgcgtggggatgaattccttgctacagtaaaagggttgaaataaaatgaaaaaaataatgtttactggtgggggaaccgtgggacatgtgacccttaatctcctcttgattccaaaatttatcgaagatggatgggaagttcattatattggggacaaaaaaggaatcgaataccaagagatcaaaaagtctggattagaggtacgattccattcgattgcaacagggaaattgcgacgctatttctctttccaaaatatgatggatgttttcaaggtagcttggggaacactccaatccatagcgattctgctccgtgtgcgtccacaagttctcttctcaaaagggggatttgtctcggtgccaccagtgatcgcggctcgtctcactcgtgttcctgtctatatccatgagtcggatctctcgatgggattggccaataaaattgcttataaatttgctaccaagatgtacacgacttttgagcaagcacatggtttgacaaagagtgaacatgtcggtgcggtaaccaaagtcacagatcatattccgccgacttcagaagttttagaagaaaaaacaaaaggtttccgaaaagagttgccgacccttctctttgtcggaggatcagccggtgcgcgtgtctttaatgaatttgtgacagagtatcaagcagagctcttgcagcactacaatatcatcaatttgacgggcgattcaacattgaatcaggctgaggggggcttgtatcgagtggattatgtaaccgatcagtatttgcctatgctccagaaggctgatttagtggtgactaggggtggagccaataccttatttgaactcttggctatgaacaaactccatttgattgtgccgcttggaaaagaagccagtcgtggcgatcagattgaaaatgcccaatattttgtggataaaggttatgcagagcaattgcaggaagatcaattgaccctcgaaacctttaatgaaaccattcaagaaatgttgaagcaaagccaagtttaccaccaagcaatggaaaaatcgacagaactcctttcactagacgatttttatggcctgcttcaaaaagatatcagtaagggaaaagatgacggacgacaataaaaaaacaccaacggatgacaaaattacagaattgtcagcctggcaaaaaagaaacaaagaatatttagaaaaaaaggcgcttgaaaaagcggaagaagctgaaacagaggaaactgaaagcaaagaagcacaagaagacgaagatctttcagaaaatgaatcggcttctatctcagaggaagaatctgaagaagaaatagaagattctgaagaggaaaatgaatctgaggtcgaagaggatccagatgcggatggagaaagttcagaaagagaagagaacggtccggctgtagaggagctagatccttcagagaagcaagagaaaaagccttcgttttttgaacgcttaaagacgaaaaaaacaaagaaggaaccgacagtggcaaaacgccatatctatcgtgcccttccggttatcggaatcagctcgattgtcgcccttctctcgatctattttttaagtcccttgtctacacagaaagtgattgaattttcagggaataaagcggttgaccagcaaaaattgtatgaaaaaagccgtattaaagaagaagattatactctgacgaccttccttcataagtcggtctatgaacaaaacataaaaacagctagtccatggatcaaagaagtgcacatgcattatcaatttccagtgacctttaaagttaatgtagtggaacacaaagtggttgcttattatgtgacgggagaagaccactatccagtattggaaaacggagaagtagttgagacagtaacgcctgcttcggacttaccatcctcctatattagcttgaaattctcagatagggaattagtcagacaattcgtccaagaaatgaaatccatttcgccttccattacggataaaattgtttcggttgatctgacaccaagcaaggttacgaaggatctagtgaccattaccatgaaaaatgataataaaatcttggtccctgtttcccaaattacccgcaagcttccttattataaggccattagtaagcaattagacgatgattccaccattgatatggaggctggagtcttcagctatagcgaacaatccatcgcagatgccaaagagcaagctgaaaaagaaaaggctgaaagtacagaaaagcaagaagaacattctgaggaagccagccaagaacagaatccagaaggcgaaaattcttctggtaatgagcaaagcccataaattatctcaaataattgaagaaaaaatgtccattttaggcttctttgtgatataatgaagtttggatagttccaactaaaagggctataaatagatgtaaagtgaaaacaaataaagagagaggactggtgtaatggctagagacggcttttttacaggtttagatatcggtactagttcaataaaagtattggtggcagaacatgtcaatggagaaatgaatgtaattggagtcagcaatgcaaaaagtgctggcgtcaaagatggaattatagtagatatcgaagctgcttcaaatgcaattaaaactgcaatcagccaagctgaagaaaaagcagggatttcaatcaatctagtcaatgttgggttgcctgcaaacttactacaaatcgaagcgactcaaggaatgattccagtcacaagtgattcaaaagaaatcacagatgcagatgttgaaaatgttgtcaaatctgcactcacaaaaagtatgacaccggatcgtgaagtgatcaccttcattcctgaagaattcacagtagatggtttccaaggaatccgtgatccacgcggaatgatggggatccgacttgaaatgcgtggtcttctttatacaggacctcgtacaatcttgcacaatttgcgtaaaacagttgaacgtgcaggcttacaagtagaaaacatcatcatttccccacttgcgatgatcaaaacagtcttgaacgaaggcgaacgtgaattcggagcaacagtgattgatatgggtggtggccaaaccacagtggcatctgttcgtagccaagaacttcaatttacaaatatctaccaagaaggtggcgattacgtgaccaaagatatttctaaagttttgaagacttctcaaaaattggcagaaggtttgaagttcaactacggtgaagcctatgtgccatctgctggaaacgaagtattccatgtagaagttattggtgaagttgagccagttgaagtgactgagaagtatttggctgaaatcatttcggcacgtatcaaacacatctttgagcaaattaagcaagaccttgagagaagacatttgttggatcttcctggtggtgttgtgattatcggtggaggcgcaatccttcctggtgttgaagaattggctcaagaagtctttggtgtaaatgtgaaattgtttgttccaaatcaaattggaattcgcaatccagcttttgcccatgtgattagtttgtctgaatatgcaggcaatttgacagatgtggatattattgctcaagctgcggttcgtggagacgaagtcttgcgtcaacaaccgattcaatttgatcgacctgtgcaaccacaagtacaaccacaacctgctgctccagcacaaccggtagtacctgcgtacaatgctgagaagattgaatctccagtggatgctcaagaaattccagcagcaagtaatgatagcaaacaagaaccaaaaactacattcacagaccgaatgaaaaatttgatcggtaatatgtttgattaaggagtgtaagtatttatgacattttcatttgacacagcagcggcacaaggtgcagtaattaaagtaatcggtgtcggtggcggtggcggtaacgccatcaatcgtatgattgacgaaggcgttgccggtgtagaattcatcgcagctaatacagatgttcaagcactttcaagtgcaaaagctgaaacagttatccaattgggtccaaaattgactcgtggattgggtgctggaggtcaacctgaagttggtcgcaaggcagctgaagaaagcgaagaagtgttaacagaagctttgcaaggtgcagacatggtcttcatcactgcagggatgggtggaggatctggtacaggtgctgcaccagtcatcgctcgtattgctaaagcagttggtgctttgacagtagcagttgttactcgtccattcgggtttgaaggttcaaaacgtgggaacttcgctattgaagggattaatgaacttcgcgaacatgtagatacattgttgattatttctaataacaacttgcttgaaattgtggacaagaagacaccgcttcttgaagcgttgagtgaagctgacaacgttcttcgtcaaggtgttcaagggatcactgacttgatcacaagtcctggattgatcaaccttgactttgcagacgtgaagactgttatggaaaacaaagggaatgccctcatgggtattggtgttggtagtggtgaagaacgtgtgatcgaagcagctcgtaaagcaatttactctccacttcttgaaacaaccattgacggtgctgaagacgtgatcgtcaacgtaacaggtggtttggatatgacattgatcgaagctgaagaagcttcagaaattgtgaaccaagctgcaggtcacggagtgaacatctggttgggtacatctattgatgaatctcttaaagatgaaatccgcgtgacggttgttgcaaccggtgtccgtcaagacaaggtagaacgcgtcagcgggattgcttcctcacaacgtccttataaaacaggaccacgtgaacaacgcccacaaacggcaccatttgaccgtgaatttgatttgaaacaagatgttgaattgccaacaactccaagtcgtccagcggtagaaccaaaccgtggctcagcttttggtgattgggatatccgtcgtgagaatatcgttcgccaaactgaaccaacatcaactcatcaagttgatcgttacgtagattcatcttcagatgatgatgaattggaaacaccaccattcttccggaatcgttaatcatgaatctggtagagaatgctgatcttgttcggcaacaagtagaaactgcaagaaacaaagctaaccgtcaagatcaagtcaatgtgatagctgtcaccaagtatgtggatgttgccacaacagaagcactggtgaaaacagggattcagcatatcggtgaaaatcgtgtcgataaattcctagaaaagtatcaagctctaaaagagtatgatcttacttggcacttgattgggagtctccaacggaggaaagtaaaagatgtaatcaatttcgtcgattactttcatgccttggattcggtgaagctggctcaagaaattcaaaaacgagcagaacacccgatcaagtgtttcctccaagtgaacatttctggtgaagaaagtaagcatggatttgcacccgatgaactggatgatgttttagcggaaattgcacagctggacaaaattgaaattgttggtttaatgacgatggctccttttgaggctagtcaagaagagttgcaggatattttttcaaaaactcaccaacttcagaaacaactagaaaagaaacaattaaaaaatatgcctttttcagaactaagtatgggtatgagtcgtgactttgaagtagccattgcgaacggagcgacttatgtaagaattgggacatcattttttaaataggaaagaactatgtcattaaaagataaatttaacaactttattgactacttcacagaagacggtgaagaagtagaagttcgcgaggcaaaagcagctggggcggaaacacaaccagttccacagccacagccgactcctcaagtgacttctccacgtccacagattagtcaaagagaaccagtaaaaccaaaaccgactcctgtcgcacctgttacgactccagtgtctacagcggcagtgaaggaacctgtttcaacaacgaaaaatacatctgaaaatattactcgcttgcatgaacgtcaacgtgaattggctgctaatcgtgcgaatacagatgaaaagattaccattgatgtacgctatccccgtaaatacgaggaagcgactgaaattgttgatctattactatctaatgagagtatcttgattgacttccaatatatgacagaagtacaagcacgtcgttgtctagattatttggatggggctcgttatgttttagcaggaaatcttcgtcgtgttgcaagtacgatgtacttgttgactccaattaatgtagtcgttaacattgaagatatccgccttccaaatgatgtggaagtgacagaatttgactatgatatgaaacgtaatcgttaagatgattatctttcaatatctatccaatatcattcaaatctattccatcattcttgtcatctatgccttactttcttggttccctggggcacctcaaagtactcttggataaatggttcaccgcctagttgaaccatttttgagcctttttagaaagttacccttgcagtttggaggcttggattttacggttcttgtagcgctgctggttttgaatgtattaaaccagttgttggggcaactatttctacaattgattggttagtatacgatgggacagaaagagatttaccaacatttcaatcgtgaagatcacgaatttattgatcgttgtattgaattgtctgaaagagtaattgaacgctattctgttgaggtgacgggttttttaaaccctcatcaggtcgctattttacgaaatgttgcggcaagctatcagttacaggtctttgcttccagtgatgagcagaaaatggagtatgccaaggtcattgtggctccggattattatcaattggatccaaatgactttgatctggccttattggaaatggtctatgcttcaaaatttcatcacttgagtcattctcaggtactgggaaccattgttcaccaattaggagtggagcgcaagtcctttggagatattctgacgagtgaaggaaagatccaagtatttgttgaacagcgttttgttcactattttatggatcacatccagaaaatttctcgggtacctgttaggcttagggaagttcctctatcagaacaaatgatcgtagaggaagaaagccagcagcgagatattctcgtgtcgagtttccggttagacaaggtgattgctgggaccttcaggctttcgcgctcacaagccagtcagttgattagctctggcttggtgaaagttaattatgcgacgacttccaatgttagctatgctgtaggtctgaatgatttagtcagtgtccgacgctttgggcgtcttaaaattgtttctgaaaatggtatttcaaagagtggaaaatacaaattaactgttgaagtactcttaagtaaaaaatgaggaggagttatggctcttactgctttagaaattaaagataaaacttttggcgttaaatttagagggtatgatgcgaatgaagtagaagaattccttgatatcgttgtgcgtgattatgaggatcttgttcgtttgaatcatgatcaagaaacaaaaattcatgcccttgaagaacgcttaaactattttgatgaaatgaaagattcattgagtcagtcagttttgattgcacaagatactgctgaacgtgtgaaacaagctgctaatgagcgctcagaaaacattgttcgtcaagcagagcaagatgcacaacatttagttgatgaggctaaacaaaaagcaaatgaaattcttcgtcacgcaacggataatgccaagaaagttgcagttgaaacggaagaattgaaaaacaagacacgtgtcttccatcaacgtttgaaatcaacaatcgaaagccaattgagcattatcgatacgcctgaatgggatgaaattcttcgtccaactgctatgtatattcagacaagtgatgaagctttccgtgaaattgttgaaaaagctttgggtgaatcagtgcaccatcatccagaaaatgagaatatcgatttgactcgtcaattctctccagctgaaatcgaagaattgcaaaaacgcatcgaagcagctaatttagaattgggtgcaacacaagcgtttgaaggtttgaatgaaaaagttcaatccgctttagaagaagcagagcacgctcgtcatgaaaatgaggcggttgttgaggaaccggttcaaccagaagacgaaacgaatcgtgaatctgtcaatattttataattttgtaaaaacaggtccattaatgataggtctagcgagcagatgatggtggaaggtctgcactccctcttaatggatgatccttttacagtattcgttctgaacccttgagtaagaacggacgtttccctcgttacgggatgagaggagaaggtcgcttgcgacttctcgaacaaaggtggtaccacgagcaatcgtcctttttaggatgctcgtgtttttttatagcttttaaatcaataaggagacataatgaaactcaaagaaacattgaatcttggaaaaacagcttttccaatgcgggctgggcttccaacgaaagaacctgtttggcaaaaagaatgggaagatgcaaaattgtatcaacgccgtcaagagttgaatgaagggaaaccgcattttacccttcatgatggccctccgtatgccaacggaaatattcacgtgggacatgccatgaacaagatctcaaaagatatcatcgttcgttccaagtctatgtcaggattttatgcaccgtatatcccaggttgggatacccatggtttgccaattgagcaagtcttggctaaacaaggtgtgaaacgcaaagaaatggacttggttgagtatttgaaactctgccgtgaatacgctctttctcaagtagataaacaacgcgaagacttcaaacgcttgggtgtttcaggtgattgggagcatccctatgtgaccttaacgcctgactatgaagcggcgcaaatccgcgtctttggcgaaatggccaataaaggttatatctaccgtggggctaagccagtttactggtcttggtcttctgaatcagctcttgctgaagcagagattgaataccatgatttggtatcaacgtctctttactatgctaacaaagttaaagatggtaagggtgtcctagatacagatacctacatcgttgtctggacaacaactccatttactgttacagcttctcgtggattgacggtaggtgcagagtttgattatgtcgtagtgaagcctgctggatctgaccgcaagtacgtcgtagcctctgaactcttgccaagcctttctgaaaaattcggttgggagaatgttgaagtccttgctacttaccaagggaaagaattgaaccatatcgttacagaacacccatgggatacggaagttgatgaattggtgatccttggtgagcatgtaacccttgattcaggtactggtattgtccatacggctcctggttttggtgaggatgactacaatgtagggattgcaaatggcctcgaagtagccgttacggttaacgaacgcggtattatgatggagaatgctggtcctgattttgcaggtcagttctacgacaaggttgtaccaacggttattgagaaacttggcgatttacttcttgctcaagaagaaatctctcactcctacccatttgactggcggacgaaaaaaccaatcatctggcgtgccgtgccacaatggtttgcttctgtttcaaaattccgccaagaaatcttggatgaaattgaaaaagtaaaattccactcagaatgggggaaagtccgtctttacaacatgattcgtgaccgtggtgactgggtgatctctcgtcaacgtgcatggggagttccacttccaatcttctacgctgaagatggcacaccaatcatgacagctgaaaccatcgaacatgtagctcaactctttgaagagcacggatcaatcgtttggtggcaacgtgatgccaaagacctcttgccagaaggatttacccatccaggttcaccaaatggtgagttcaaaaaagaaacagatatcatggatgtctggtttgactcaggttcatcatggaatggggtcgtggttaaccgtccagaactcaaatacccagcagatctttacctagaaggttcagaccaataccgtggttggttcaactcatcactcatcacatctgtggcgaaccatggtgtagcgccttataaacaaatcttgtcccaaggtttcgccttggatggtaaaggtgagaagatgtctaaatctcttgggaataccattgctccaagcgatgttgaaaagcaatttggtgctgaaatcttgcgtctctgggtaacaagtgtagactcaagcaacgacgtgcggatctctatggatatcttgagccaagtctctgagacttaccgtaagatccgtaatacccttcgtttcttgattgctaacacatctgactttaacccagctgaggatgcagtcgcttatgaagaacttcgttctgttgataagtacatgaccatccgctttaaccaacttgttaagacgattcgtgacgcttatgcaaacttcgaattcttgaggatttataagactttggttaactttatcaatgttgatctgtcagccttctaccttgattttgccaaagatgttgtctacatcgaaggagcgaagtctcttgaacgccgtcaaatgcaaactgtcttctatgatattttggtgaaaatcactaaactcttgacgccaattcttcctcacactgctgaagaaatctggtcataccttgagtttgaagcagaggattttgttcaattatcagaattgccagaagcagaaacgtttgccaaccaagaagaaatcttggatacttggtcagccttcatggacttccgtggtcaagctcaaaaagccttggaagaagcacgtaatgaaaaagtgattggtaaatcactagaagctcacttgacagtttatccaaatgaagtggtgaaaacacttcttggagctgttgataacaatgtcgctcaactcttgattgtttctgagttgaccattgcagaaggcccagcaccagaaggtgcagtgacctttgaagatgtagccttcacggttgaacgtgcagctggtgaagtttgtgaccgttgccgtcgtatcgatccaacaactgcagaacgccactaccacgcaaccatctgtgatcactgtgcaagcattgtcgaagagaactttgcggacgcagtcgcagaaggatttgaagcaaaataataagaagtgaaaaatcgcagggagagagtctccttgcgacttttcaataaagaggaagttatgtggtaccagaaagaatttaaggaactagaactgaaagagttttacgagatcgttcagctgcgattagagacctttgtcgtggaacaaactaggacctacaatgatctcgatgatattgattatcgatctatccatctttttcatcaaaatagggaaggacgtgtggatgcttatgctcgcatattcgcaacgggactgacgattcattttggcagagtggctgtttccaaaggtagccgtggtcaaggactaggaaaagctatggtagagcaaattttggacctgtgtgaacagagatttcctggacggaccattgaaattgaggctcaagaacaggtggtcggcttgtatgaaaaattaggttttcaaacggtgagcgagccctttatcttggcttcttcccctcacgtaaaaatgatctttcagaaataaagaatcctttcatctcataatcgaggtgaaaggattttttttggaaaaagataccaaaaaaaaagtaaggcaaattggccttacttagtaattggaaaggaaatttcaattagtttatcagagtagagggttttaatagcggattggtcaatgttttgaagatcaatcttacgttttaaaaagaactcacgaattaattctacttcagtttcacgaatagctcggtgtttgttgctgatcaacaattcgtagtgggttggggcttgtgtaaaaataacatcagtattgcccgcggaataaacctcgacaagcaaggcgtcagtactagcaagttgatttttaaccaaggtagcatgactattggtggtattaatgagcttcatatgagttcctcctgacctctatcttcatttattatagcacttttttttattttgtgaaagaagtcctttagtttttatgggcaattttccactgttcaatgccccatttatggctgcctcgtttcagtttttcaatcgcttcctctactgggaaccaagagagattgttaaaatcttccagtggtttttgagtttctgtgtagtcgacgacttcataaatataggcaggattgtagtagtaggtatcccggtggctagaataaaaatactcgtctgcttggccatagtatcgccctaaaatagcagtaaagcctaattcttcgatcagttcccgtttcagagcttgcaagtgatcttcacccgcctcgatttccccgccaggtaagaaccaagccccatttggagcttgaacgaggatgatctgatcctgatccttattgggaataacagcgtagacaccgtatcggttcacatacgcaacatcttgtttcttttcaccaaaacttggaatggtcatggttttctcttttcttattttttcatcattatatcatattttttagcaaaaatctggaggaaaaaaaagaaagagactggattttccagtctctgaatgtacatttactgattatgattctgaagtctgttcaactggtttgtgagcagacttgatagagattttcccattgctggtcatgacggctttgagttgtttttcacttggatgttccaggtaataatcagtaatagcatcttcgatatagtcttggatggtacgacggagtgggcgggcccccatttttggatcgtatcccagatcgaccaatttttctttcaccttctctgtgacgtccagatgaatctcattttgtgcgagacgttgattgacttcatcgagcatgagggtaacgatttgaagcaggttttcttttgatagaggttggaattcaatgatgccatcaaaacggttcatgaattcggggctaaagaagttaccgagttctccaagtacagagttggtgcgtccttcgcgagccgctccaaaaccaacattggcctcagctttgccggttccagcattagaggtcatgatgataatggtatctttaaagctgacggtgcggccttgaccatctgtcagacggccatcatccaagacttggaggaacatgtgcatgacgtctggatgggctttttcaacttcatctagcaaaacgagagagtatggattgcggcggaccttttcagttagttgtccagcttcatcgtagcccacatagcccggaggagctccgactagtttcgctacgctgtgtttttccatgtattcgctcatatcaaagcggatcatattgtctgcagaaccaaagagttcaatcgccaattgtttagacaattcggtcttcccgacaccggttggtccgacaaaaaggaagcttccgattggacgatttggcgatcctaggccgacacgattgcgtcgaatggctttcgcaattttatccactgcatcatcttgaccgatcacatgggctttcaaatcagaagccagattgatcaattgagactgttccttttctttcaaatcaccaacaggaatattggtcttttgttcaacgatatgctcaatggttttttcactgatgacaggagtctcctgatctgtgacatgttgtccttgcatttccttgtatttcgcgatttggtcacggaagtaggctgctttttcaaagtcttcttcacgggttgcttgagctttgaggttttcggcttcaatcaagcgctgatcgataacttttggatccacgaagttcagagtcaggttcattttagacccggcttcatccaacaaatcaatggccttgtctggcaggaagcgatcttggatgtagcggtttgaaagaatagctgccgcttcgatagccccgtctgtatagtgaacgtggtggtagtcttcgtattttttctggatgcctttgaggatggtgatggtttcttcaaccgttggctcatcgaccttaacgggttgcatccgacgttccaaggccgcatctttttcaatgatgcggtattcattgagggtagtagcaccgaccaattggagttcaccacgcgccaaggctggtttgaggatatttccagcgtccatattgccttcgccagcagatcctgcgccaacaatttcatggatttcgtcgatgaaaagaatcacatcttcacgttgacgaatttcatccattaatttttgcatgcgctcttcgaattgaccacgaatacctgtgccttgaacgaggctaacgacgtccaggcggatgacttcttttccttgcaatttatgaggaacgtctccgtcgacgattttttgggccaagccttccacaacggcagtttttccgaccccaggttctccgatcagaaccggattgttcttggttcgacggttgagaatttcgatgacacggataatttcttcatcacggccgatgacagggtcaatatcccctttgcgggcaatttctgtgacattgataccgaattcttctaatagtcctttaggcttttgaggacgagcttgacgggggtcttgactgccgttacggttattgttttggccgtaaccgccacctccataactgcctccagattgagttggaggtgtttgaggttcttgtggactttggaagtttccaaggttattgaagaaatcttcgaaggggtctccagtcagttgactccgttgggtcatgcctttcaagaagctgttatttgggtctgttttcataattttatagcaattttgacagaggtctacttgttgctgacgtccatttacatttgtatataaatggatggttgattcatttattttacaattttgacaaagcatatacatacctcacagtagggttttgatggtcttccatcaagagaatagcctatttttaaaaggtcaaaaatagtcaaagatttatagtttcattatatcagtattctagaagtttgcaagaatttgctacgaaatgtcgcttaggaatactgaagaaagcaaatcaatggaaaaatgtgaatttttattggaagagctttctcttttatgataaaataggagagtagaaagtaaagaggagaaataaaatggaatcacatttagtacggattatcaaccgtttggagacgatgacaaaagacggtggaaacttaaaacgtaattttgaacgtgacggtgttgttgtcgctgaagtagcctacaaccacaatgaagaagaaggttcaacctttacacttcgtgatgttgaagcgcgtgaaacctatacttttgacagcattgatttaattgcaatggaaatttatgaattgctatactaagcaactgagtggatgagtttggggtggtctcaagctcattttttgtccatctggctatagtttgcgtctataagaaattctaaataggaacagttaggtttgagacttgaaatctgctataatagagaggactattttcattacttgactagaaagagaattgacatgacgacactcattgatggaaaggcgctcgctacaaaattacagggtgagattgcagagaaaacagcacgattaaaagaagagacaggggttgtacctggccttgttgtaatcgtggtaggagataatccagccagcaagatttatgtaagaaataaagagcgttctgctattgcggcaggctttcgcagtgaagtgagacaacttcctgaaaatatcagccaagatgaattattagaagtgatcgaacactacaatcaagatcctctttggcatggaatcttagtgcagttgccactgcctaagcatatcgatgcggatgcggttcttttagcgattgatccgaccaaggatgtggatggctttcatccattgaatatggggcgtttatgggctggaaatcctattatggtgccatcgacgcctgctgggatcatggagatgttcaaagagtatgggattgatctagaagggaagcgtgcagtcgtgattggtcgttccaatatcgttggaaaacctatggcgcagttgctcctcgccaaaaatgctacggtaaccttgacccattcccggacccatcatctgcctaaaatcgctaaaagagcggatatcctggttgtggcgatcggtcgtgcaaaatttgtaacagcagacttcgtgaaagaaggcgccgtcgtcattgacgtcgggatgaatcgcgatgagaatggcaaattgtgtggggatgtcgattttgactccgttgcccctttggccagtcatattactccggtaccaggaggggttggtcctatgaccgttaccatgctgatggagcagacctacgaagcagctgttcgtaccttaaaaaaatgaaagtgtgagcgagatgaagtttgtctttgatttagatggaaccttgtcattcgatggtgttgcaatcgatgatgaaattaaacaggtcttattgagagcagaagaatttggtcatgaagtcgcctttgcttctgcacgttcttatcgggattgcttaggccttttaggggatcaactgagccatcaactcgtgattggcttaaatggcgggctagcttatcgtcaggggcaactggtttatgaggatcaattggacaaggatgtatatcgagaagtccttggtttttgtcgccattacaatctaccattttttgtggacgatacctttgattatagtggtcagattttggaaaagattccttttattgcgaatgtggatcccctcaaaaaagcccagtatcgttctttagaggacctgacaaacccgattaaggttgtgatctatatggggggccatgaggaattggtagatgaaatcatcgagcgaattgaacagaccaataaggcccacattcgttatcatgctcatgaaaaatgtatctatctcaatccagcaaacactcataaagcgacaacagtcgaagaactctgtggagaaaatttcgtggcttttggtaatgatcaaaacgatattgagctctttgaaaaagctatttatgcagttcaaattggcgattttccatcccttcggccttacgctgatgatcaattagtggccaagcaaaatcatccacaagctgttgctgctaaaatcttgcaagtcttcgcagaatttagaggaaaataaaagaaggagggggagtcgtggcttctcctttttcgctagaaatgaggaaggtatgagaagagttcggaaagaagagatccagcgcgtcattgtgaagcgcccaatgacgtcatataagggagattttggtcgtctgctcctgattggaggaacctatccctatgggggagccatcattatggcagcgatcgctacggttcatagtggggcgggcttggtcactgttgcaacagatcctgacaatctgacggcccttcatagccatcttcctgaagctatgggctttgatctagcggatcacgaactcctttgtgagcaagtgcaaaaagctagcgtgattttagtcgggccgggcttaaaggaatctaatgaaaaccaaggagtcttacaaatgatttttgagcaggtctctaggcatcaggttctgattttagatggaggtgctattagtctttttgcaacctctcaatttgacttgccagaagctcagttggtctttacccctcatcaaaaagaatgggaaaaactatcgggacttgatctagcaagccagacagaagagaagagccaaagagcagtacagaactttcctgaagggactgtcatagtagaaaaggggcctcacacacgaatttggacaagtgggaaggaagagggctatcagctagatgttggtggtccctaccaagcaacaggtggcatgggagataccttggcagggatgattgcggggtttgcaggtcaatttccacaggttggactctatgagcgcgtggcagtcgcgacctaccttcattcagcgattgctgaagacttgagcaaggagtcttatgtggttttaccgacaagcattagcaaagaaattcccaaatggatgaagaagtggagtgacaatttaaacgaaaatgttgaaaataaaacgttttcatgatagtatttaagaaaaggaggtgaaaaaatgaatgagcaaaaaaaatcgattaccatgaaagatgttgcagcagaagctggagttagtgttgggacagtctctcgtgtcatcaataatgaaaaaggcattaaagaggtgaccttaaaaaaagttcaacaagcaattgaaaaactttcttatgtcccagatgaatatgcgagaggattaaaaacgaatcgtagtaatattattgctttactcattccaactatatggcatcctttcttttctgaatttgcttatcatgttgaaaaagcactattaaaaaatcaatataaattattaatttgtaatgcggataaagattctaaaaatgagatagaatacataaaattacttgagaaaaataaagtagatgggattatagggatcacctattcagatattgataagtatgtctcatcaaatttaccttttgtcagtattgaccgtcatttttctgaaaatgtctattacgtaacttctgaaaattttcatggtggtcaactagcttgtcgcgaattagtcaaacgcgattgtcaaaatctagcttacattagtggtgtgaacaaacatttgaatgaaacaacggaacgggggagaggtttcaaagcggaggctaaacagaaaaatacgaacctttattgtcttgaaatgccggaaccactgaatcaagtagaagagcaaataagaaccttttttgaaaagcatcctcagattgatgggattttcacagtaaatgattttatggcccttcgtgtgataaaagttttaggggatatgggaaaaattcctatagaagattatcagattattggttttgatggattaagaccagcttttgatcaaccttacttactttctacaattgttcaacaaatagctcagatggctcaagcagcagttgaactattgcttaaattaattcgtgaagaaaaaatagaccagaatgtcataagtttaccggtacatttttttgaaggaaacacaacaaaaaaattataaaaagtgcttgacaaattatgaaagcgctgttataatttagtcataaaatgaaacgtttcaaaaaaactcagctattttagtttgagttaaaaaattaataaaaaatgaaacgtttcaaaaaggaggaagctatgcgtaaaggtattaagttatctgtagttgcagcactatcattaggattgcttgcaggatgtggtgggggatcaaaatccaaaactgcaagttcttcggacgaaataaaagtctgggttcaattctcagatgaaacagctgagggaaaagcttggcaacaagttgttgataatttcaacaagtcaaagaaaaccaaatataaggttgtgacagaatatattccacgtagtggtagcggtggaggatatgaagataaggtcaacgctgctgttacgacaaatagtttaccagatgttattacgctagatggaccaaatactgctgcctatgcaaaatcaaaagtgattgctcccttggatgattatctaaaggacaatgacatggatgatgtactggacagtattaaacaacagggaacttatgatggtaaattctatgcgtttggtttttctgaatcaaatgtaggtgtatactataacaagaagatgtttaaggaagctgggattgatgaagcgagtttgccaacccttgaaaaaccatggacatggtctgagtttaatgctattgctaagaaattaaaagatcattttaataaaccagcaatcgatttccgtttgaattcaaatgatgagatgttaccatatgcttatatgcctcttatttggtcaaatggtggttctgttgtaaattctaaaggaacaaaagctgaaggttacttcaatagtaaggaaagtgttgaagctgttcaatttattcaaaatctagtaaaagaggattacactacagttagtcctgttgaaaaaggatttgaaacaggtgagtatccgatggttctaagcgggtcttggacgattggggatctacaaacaaattacaaagatattgattttggtattcttccttatccagtttcagataaaacgaagaaattggtctcaccttcaggtagttggcaattagctgttacaacaaaatctgataaaaaagaagctgctgctgaatttgttaagtttgcaacaaatacagaatctagtgaaattataagcttggggaacagtgttcttccaatcagaaaatcaacaattaaaaatattaaggataaagtatctgaaccattgcgcttcttgatggaacaaaatgctgtatcagcccatcctcgtcctgttgtagtagcttatccacaagtttcacgcgctttccaacaagcgatgcaagatatcagctattataaagataatccagatgtacaaaaagtattagatgctcgtacgaaagaaatgcaaacagcaatcgaccaatctttaaataaatagttgatattcaaaaggtggaaggaaagttatgaaatgtaccttccaccttattttatttaatgatttcatcttaggagacgaacaatgagcgaaacaaagaaagtcgaaacaaaaaagaaagaacgtcttaaagaaaatattatgggctatagctttttagctccagccttagtattactttttatctttttggtgatacctgttggtatggtcatctattatgcctttacagattattacctattgaccccagaggacagaaaatttgtagggttacaaaatttcatgcgcttagcacaagatccgatctttataaaaagcttcctgaataccttgaaatttgttgtttggattattccagtacaacttggggcagcccttggtatggctttaatcgtaaataagaaacgtaaaggaaacatgttctttaaggtagcattctttgctcctgttgtgatgtctctcgtggttatctctatcctttggctatacttgttaaatccaaataatggtttgcttaatgccctactgaataaaattggtatttcttcacaaccattcttgacaagtccaaaacaggccatgtatgcaattgtatttgtttctgcatggcaaggtgcaggctatcaaatgttgttattccttggaggaatgcaaaatattccacaagatgtttatgaggcagcagagttggatggattttcaaaatgggctcaattcagatacatcacaatgcctttattgaaaccaactgccttatttgtactcttgacgacattgatttcagcatttaaattgattgtgcaaccaatggtcatgactcaaggtggaccactaaactcaacaattacaatggtatattatatttaccaacaaggtttcacagaccgtctcgttggttattcaagttctattgccttagtatttacaacattgattggtatgatcagtcttgtacaacggcgagttttgaaggaggacgattaggatgaaacgtttaaaaccgacttctattttagaatatattttattaattctattagcaggcctctttctatttcctatgatctggatggtggtttcagcaatgaagccagaagcagatgtgtataagaatttaacaagttggaaagctttcttacctagttttaatccagctgattggtttaaaccttaccaagaagttctttcacgttttagtattctaacatacttagggaacagtattttttatgcaggaacatttgcactggggtctattatagtaaatgccttagcgggatttgcatttgcaaaaattaattttacaggtaaaaaaattctatttggctttttattggcattgttaatcattccgattgaaacagtgttgattcctcaatttacaattattaattcccttggcttagtcaataatcgtttagcggttattatccctggattagctagtgtctttaatatctatcttttccgaaacttctttattgccattccagaagaaattatcgaatctgcaaaaatagatggtgcaagtatcctgcggatctttttcaagattatgttgccgatgtcgaaaccagcagttgcaacagtcggtgttctttcctttatttctagttggaatgattatatctggccgttgatggtgttaacagattcttcaaaattttcaatgcaggtagcgattacaaccattaatacaactcaaccagtttatatcaatcaagtaatggctgttttgacaatttctacaattccacttattctagtatatatcgtagcacaaaaatatattattcaaggtttaggtgggtctggaacaggtattaagtaggtgataaggatgaaggaaactattcgaaaagcgaatcagtatatcgatgaaaacagggagaaggttgaccagcaatatagaggatcctttcacttactacctccaattggctggatgaacgatcctaatggctttgtttatttccgcggagaataccatttgttttaccaattctatccctatgatagtgtttgggggcccatgcattggggacatgccaaatcaaaagatcttctccattgggaagaactgccagtagcattagcgccaagtgaaagctatgataaggatggctgcttctcgggtagtgctatcgtgaaagacgacaagctctacttgctgtatacgggtcatgtagacgatgaggaaaagcgcgaagaaactcagtgtcttgcggtatcgacggatggcattacctttgaaaaaatccccactaatccagtgattcatgtgcagcatattgatggtatcgcagatattgctgattttcgtgatcccaaagtctttgaatacaaaggaagctattatactgtagttgcttccaaaacagtagatgatcgagggcaaattctcttgtttgcgtcaagtaatctagaggactggagctttaaatcagtcttactggaaggtgaaaaagggcaaggtatcatgtgggaatgtccggatttcttccccttagatggtaaatgggtcttgattctgtctcccattgaaatggaaagacagcaagaaaaatactggaatttaaattcgactgttgcctttatcggtgacatgaattgggaaacgggtcagtttgttgtctattcatatgatgaaattgatggtggcttggacttctatgctcctcaaacttgtcaaggaccaaatggcgaacgatacatggttgcttggatgcaaatgtggcaacgttccatccctagtcatgacttaggtcatggttgggcaggaagcatgacggttcctagaaaattaggtttgagagacggaagattggttcaggaattacctgagtctgtgaaagatcacttccttgtagagaatgcgtcagaaaccattgtgaagggcaatcaaatcacgatcccagctagagggaaacaaaccttgtttgagataggtgctaaatcaggtcgctcctttatcctaagctatgggaatgaatcttatgctgatagtgccttgcaattgatttacgatgcctccaataaacgctttagcttgagtcgagaccaatttggacacctcatttctggaaaagaaagcccagaaattcaatcaagatggattcagttggatggtgaaaaggatcttcatttctcgattcttcgagataccaactcaattgaagtattcgtggatggtaaaactctatcaatgaccttttatgaaacgactgagaaccctgtctataccttcaaagcaaatgaaggggtcgatttagttgtaaaaacatatcaaaaataggtatataacaatctcctaaagaacaaaaagacaagtcctgcgacttgtctttttgttttaggataggacggaagcgaggagtcctccgagaatgaggatgatagccccgctcagtcggttagccatttgggcgaaggcgatcatttccatgcgatcagatgcagagagaacggcgatatttccggttcctcccatagagttaatgaagggaactccaaacacttcttagctcctttattgaacgattagagaagtgtgaaaaataaggaagctggtttaaaaaagaccagtagaaagtgacttgaataaaatgaggattgtggagaaaggaaattcatgatttcgctttgtctgccagccttttttggtgttttttggtataattaaacttgatcatattctgcagaaaggagttcctatgtccaactatttatccgtatcaagtttgaccaaatatttgaaattaaaatttgataaggatccctatttggaaagggtttatctgacagggcaggtctccaatttccgaaaacgccccaaccaccagtatttttcattaaaggatgaaaaagcggttattcaggcgacggtctgggctggggtttatcgaagctttggttttgagctagaagaaggcatgaagatcaacgtcatcggtcgcattcagctctatgagccaagtgggagttattccattgtcattgaaaaggctgagccagatggagtaggggccttggccatccaatttgagcaactcaagaaaaagttgaccgaagaagggctctttcaggatcggtggaagcaagctctgccacaatttccaagaaagatcggggtcatcaccagtcaaagtggggccgtgattcgcgatattatcacaacggtgagccgacgcttccctggtgttgagattgtgctctacccgaccaaggttcagggtgaaggtgcatctagtgaggtggttgctaatattcaaagggctaaccaacgggatgatttggatgtcttgattatcggtcgtgggggtggttcaattgaagatctctgggcctttaatgaagaagtagtggtgcgcgccatttttgaatcgcggattccgattatctccagtgttgggcatgagacagacacgactctagccgattttgtagcagaccgacgagccgctactccgacagccgctgctgaattggccactccagtaacgaagttggatctcttgtcccatttacaaaagcaggaaaatcgcatggcaacagctatgtccaatcgcttggcctataatcgtgaacgcttggccaaattaagtcaatcggttatttttagacagcctgaaagactctatgatggctacctacaaaagattgaccagttgcaattgcgcttgaaacaaggaatgcgcgatgcttatggacaaggggccaatcagctgcaaggtctgcgtcatcgcttagaagccacgtctcctttgcatcgtattgatcgctaccaggaccgcctgctccaagataagagaatcttaaccaaccgaatggaacaagtccttaaagagcaaaagatcaaggtgcaaggcttatcagaagccctcttgatgctggatactagccggattattgcgcgtggctatgccatggtcaagcaagacggtcaggtcttggattcggttgcgaaagtaaaagaaggagacccgctgtccctcatcatgagagatggccagttagaagtagaggtaaaacatgtcgaaagaaaagaaatttgaagaaaatttagcagatttggaagccatcgtccaaaaattggagagtggggatgtggctcttgaagaagcgattacagaattccaaaaaggaatgaagttgtcaaaagaattgcaagataccttggatcaagcagagaaaaccttggtcaaggtcatgcaagcagatggtactgaagcggatctagcatgagacaagaagaaaaacgaaatagagtagagcaagcaattcgctctttttatgaggaaaaatccatcgctccccatttagtggactcggtcctgtattcgatccaggcaggtggaaaacgcctgcgcccaatgcttcttctagaattgttagaagcctttggactggaattgacggaggctcactttcaagtggcaggagctttggagatgatccatacaggaagccttattcacgatgatctgcctgctatggacaatgacgattaccgtcgggggcaattgaccaatcataagaaattcggagaagacctggcgattttagcaggggatgcgctttttcttgatccctttgggatgattgctgccagtgcccttcctgatgcggtcaaggtctctttgatccttgaattgtcagatgcttccggtagtcgtggaatggtagctggccaagtcctggatatggaaggggagcacaaacagctcacattagcagagttgcagactatccatgccaataagacaggacgcctccttgcctatcctttcatcgcagctggtttgattttagagttgcaagcagacattgctcagcttttaaaaaaaatcgggaaaaaattaggcctggcttttcaagtgagggatgatattttggatttgatcgctgattttgaggctttggggaagacccctcaaaaggacttagtggctgaaaaatcgacctatccagccctgttgggattggaagaatcaaaagctttgctgacaagagaattagatgcttgcgaggacttgttggatcagattacagctgcttgcgactttgatccgcaagcgatcaagaaattaatagaaggattacgaatagatggctaaggaaagagtggatgtattagcctataaacaaggcctatttgatacccgcgaacaagccaaaagaggggtgatggcaggtcttgtcgttgccgttatcaatggtgagcgcttcgataaaccgggtgaaaaaattgatgaagcaaccgagttgaaattaaagggcgaaaagctcaaatatgtcagccggggcggtcttaaattagaaaaagccctgaaccaatttggtttatctgtagagggtaaaattgcgattgatattggagcttctacaggtggctttacagatgtcatgctgcaaaacggagccagccaggtcttttcggtggatgtcgggaccaatcagttggcctggaaattgcgcaatgatcctcgggtggtctcgatggagcagttcaatttccgctatgccgagccagatgattttgaagcgacaccgagctttgcgagtatcgatgtcagctttatttccttggacttgattctgccagcccttcaccggattttggcagataatggacaagtcgtggccttggtcaaacctcagtttgaggcaggacgcgaacagatcgggaaaaatgggatcattaaggatcctaagattcatttagccgttcttgaaaaggtcgctgcttttgcagggacacatggctttgcggtaatgggagtagattattcccctatccaaggaggccatggcaacatcgaatttttgatgtatctagaaaaaaaagaagagaaaacaaagccaactacagagcagctggaggctgttgtggagctggcacacaaggaatttaaacatgaagagtaagaatattagattagaaaaaattcgccgcttcattcgcgatcatgaagtggggacccaagaagagatcgtcgaacatttgaaagaagaaggcatctcagcaacccaagcgacggtgtcacgggatatcaaagaattgggcatcgtaaaacgccctctcaaagacatgacctatgtctatgaattgccacgtaagcaccaccaagggatcgggatgatcgaaagcaatatcttgtctcatcgtcgcatgggagaatatgtcaatttcaccatggttccagggacagcgcctttagtcaaacgtcgcttgcgggagatttataaggagcatatctttagtattgtcgcagatgatgatacgatcttgctgatcgcctattcagctccagaagcagagaatatcctcaaatcaatctttgggtggtaagagcctatgctattagaaatttcgattaagaactttgccattatcgaggagatttccttaaattttgaaaagggaatgacggtactgacaggggaaacaggtgcagggaaatccatcattatcgatgccatgaacatgatgctgggaagccgtgcaacgacggatgtcattcgacacggagccccaaaagcggaaatcgaaggtctcttcaccgttgagagcaatcgacacctgacagctctttttgaagagcaaggactagagtggaccgatgaattgatcattcgccgagagattttgcaaaatggacgaagtgtcagccggatcaatggtcaaatggtgaatttatctgtcttaaaggcagtcggtcaacatttagtggatatccatggccagcatgatcaggaagaacttatgcggccccaattgcatatcgctatgctggatgaatttggggatgcagcctttttccaaaccaaagacgcttatcgtcagaccttcgaagactacaaacgcctgcgcaaacaagtggtggaactccagcgcaaccagcaggaaaacaaggcccgtattgagatgttggagtttcagattgcggagattgaggcagctgccttggaagtggatgaggatgtgcgtttggagcaagaacgccaacgcctgctcaatcataaaatgatcgcagatatcctaaccaatgcctataccatgctggatgcagaagagttttcgagtctagccaatgttcgctcagccatgaatgatctggaaagtattgaagaatatgataccagctacaaagagctctcaggccagctggcggaaaccttctatgcccttgaggacattaccaaacgcttagaagatgtggtcgatggtctggagtttgatggcaatcgcctcatgcaggtggaatcacgtttagatttgatccactccatcacgcgcaagtatggtggccaagtcaaggacgtcttagaatacctggcgcaaatcaccaaagaatatagcctcctcactggaagtgacctctcgtctgaggacttggaaaaagaactcaaacgtttggaaaaaagtttggtcaccttggctcaagatttgagtgatcagcggcatgccctggcccaagctttggaaaatgaaatccagcaagaattggcagatctctacatggacaaggcgcgttttcaagtacgttttagcaaggctaagtttaatcgtgagggaaatgaagctgtcgaattttacatttcgaccaacccaggtgaggattttaaaccccttgtcaaggtagcatccggcggagaattgtcacgcttgatgttggccattaagtctgctttttctcgaaaagaaggaaaaaccagtatcgtctttgacgaggtggatacaggggtctctgggcgcgtggcccaagcgattgcagcgaaaattcataagattggtcaaaatggccaagtgcttgccatttctcacctgcctcaagtcatcgctgcagcagattatcaattctatattgagaaaatcagtgatgaacactcaactgtctctactgtgcgtttgctcaatagagaagaacgaatcgaagaaattgccaagatgctggcaggagaggatctaacggaagctgcccgtcaacaagcagagcaacttctcaagcgttaagagaaagaaggtttgaaataatgtcaagatactttgtagtcggagatattcacggaaaagcacaaatgctagaagagctcatgacagagtgggatggaaaagcccaattggtctttttaggggatttgatagatcgaggcgaaaacagcaaacgatcgattgaaatcgtaaaagactacgtagaccatcacggagctgtttgcctttccggaaatcacgagtacatgtttttagcctggttggacaatccagaagagcgttatgaccactaccgaagaaatggtggcgatacgaccatcaactctctgttaggccggccactcgatgctcctgtagatggcattgcggatgcgcaagcagtagaaaatgccgttcctgacttggtagcctttatccgcagtttgccttttgactacgagacagagacctattattttgtccacgctggtgtggatctaacccttgaaaattggcgggaaaccagtgattaccaaaaagtctggatccgaaaaccattccatgaagcggagaatcatacaggcaaatggatcgtctttggccatacaccagtatatggactgctcaatgagccagtcggtaccgaaaatctttggatttcagatcaaaaaatgggcgtcgatgggggcgctgtctttggaggagtcctccatggattgctcttggatgatcaaggtattgtccaagaccatgtccttcacaatacaggtttttctgccgcagacgactgaggaagcaggaatggatatctttcactgcaaaaccccgtgttttttgatataatgaaagcagaacattcttaggaagagtatagaaatatatggcaaatattaaaatagttacagactcatctattacaattgagcctgaagtggttgaagaatatggcatcaccattgtgccactttctgttatggtggatggagtcctttattccgacagtgagttgggcgaaggggacttcttgcgcttaatgcagtctagcaaaaatcttccaaagaccagccaaccacccgttggagtctttgcggaggtgtatgaaaagttagcagcagacggagctaatatcgtttcaattcatatgtctcatgccttgtcaggaaccgtagaggcggctcgccaaggggcaaccttgtcaggagcagatgttactgtgattgatagtggctttacagaccaagccatgaagttccaggtggttgaggcagccaagttggccaaagacggagctgatttagacactgtcttggctcgcatcgaagaagtcaaagaaaagacagagttgtatatcggtgtttctaccttggaaaatctggttaaaggtgggcgcattggccgtgttacaggacttttgagctcccttctcaatatccgtgtcgtgatgcaaatgaaggaccatcagttagaaccaatcgtcaaagggcgcggtaacaagacctttaagaaatggttggatgaattggtagagaatctttcccatagtaaggtggctgagatcgggatttcttacgcaggggcaccagagtgggccaatgaaatgaaggctcagttgcaatcgttcgttgaaaatgctatcccagttctcgaaactggatcgattattcaaacccatacaggtgagaatgcatttgcagttttggtgcgctacgaataagctgaataaatgtttgaaaaaacaggtttagtacttgacctaaaggctttttttagatattatagtactgttaaggcgtaaagcctaaaaaaatttggaggatttgttaaatggctaacaaacaagatttgatcgcaaaagtggcagaagctacagaattgactaaaaaagattcagcagcagctgttgatgctgtattcgcagcagtttcagaatacctttcaaaaggtgaaaaagttcaattgatcggtttcggtaacttcgaagttcgtgaacgtgcagctcgtaaaggtcgcaacccacaaactggtaaagaaatcaaaatcgcagcttctaaagttccagcattcaaagctggtaaagctcttaaagaagcagttaaataattgcattttgaaaagccatcctagatttctaggatggtttttttgttggacagctctataggataagggtataataggaaaaaagaaggagagagaaaagaccatgcgattcattttaggcctctttgccttgttgtttatccgacctattttgtatctattgaaagggctgtggttcgtactggaattttgctttatgatcctcgtggtcaaaatgatcctaggaaccgtgcgctggatgaccagttggatcggttgagagtagatgaatctatttcaggctcgtgaatcaatgtcccccggacataaactcgcttttcggttttcaggctcatgaaaaaaatgtccactggacattttttttaattaaaagcattctaaatagtgatttattttgaaacatgctataataggggtaacgaatcgattaaatcatattggaaaggggggatcatagtgaacgcattgcatcgtcatgaagaagagcgcgtggaagaagtcttgcaaaatttgcgtgccaagggtattcggattaccgatacccgcagagcagttctttcctatttagtggcgagtcatgaacatccaagcgctgagaagatctatcgtgatttattgcctcagtttccaagcatgagtctagcaactgtctacaacaatatcaaggttttaattgatgagggggttgtctctgagatcaaggttcgcaatgataccacgacctattttgatttcatggggcatgaccatttgaatgtggtatgtgaaaaatgtggtcgtatcgcagatgtggacattgaagtcccagatcttcgcgaagaagcagccagtcaaagtggttaccagatcaccaagactcagatgaccgtctatggcatttgccccgactgtcagaaaaattaatgtgagagaaagcagagccgtcaggctcttttttgtgagaaattgcacttttctatggtcgccactagattttttactgaaaatctagtagaataaaatagataaacgagggaaacctcggagaataaaaaggagatccatctaatggtaaaattggtttttgctcgccacggtgagtctgaatggaacaaagctaaccttttcactggttgggctgatgttgatttgtctgaaaaaggtacacaacaagcgatcgacgctggtaaattgatcaaagaagctggtatcgaatttgaccaagcttatacttcagtattgaaacgtgcgatcaaaactactaacttggctcttgaagcttctgaccaattgtgggttccagttgaaaaatcatggcgcttgaacgaacgtcactacggtggtttgactggtaaaaacaaagcagaagctgctgaacaatttggtgatgaacaagttcacatttggcgtcgttcttacgatgtattgcctcctgcaatggaccgtgatgatgaacactcagcacacactgaccgtcgttatgcttcacttgacgattcagtgattccagatgctgaaaacttgaaagttactttggaacgtgcccttccattctgggaagataaaatcgctccagctcttaaagacggtaaaaacgtattcgtaggagcacatggtaactcaatccgtgcccttgtaaaacacatcaaacaattgtcagacgacgaaatcatggatgtggaaatccctaacttcccaccattggtattcgaatttgacgaaaaattgaacgttgtaaaagaatattatcttggtaagtaagataacataatttgttatccataaaaaaaagctgacttcggtcagcttttttgcttgtcttccttagatcctagcttgtcttgggttttcagggactcctaaaaatgttataatagagtgttactaaattgggttccattagccctgaaaggaaaagaaaatgacaaaatcattctacatcacaacccctatctattacccatctggtaaattgcatattggttcagcttatacaacaatcgcctgtgacgtcttggcacgttacaaacgtatgatgaactatgatgttttctacctgactggtcttgatgagcacggtcaaaagatccagcagaaagcagaagaagctgggattacgccgcaagcttatgtagatgggatggccgttggagtgaaagaactctggcaattactcgatatctcatacgataaattcatccgtacgacagacgattaccatgaaaaagtggtggctcaggtctttgaacgcttgcttgcgcaagacgacatctacctgggtgagtactctggctggtattcagtctctgatgaagagttctttacagaaagccaattggctgaagtattccgtgatgagaatggcaaggtcatcggtggggtagccccatcaggccacgaagtagaatgggtctccgaagaatcttacttccttcgcctcagcaaataccaagaccgtttggttgaatttttcaaatcccaacctgatttcatcacgccagacggccgtctcaatgaaatgttgaaaaacttcatcgagccaggtttggaagacttggcggtatctcggactacctttacttggggagtaaaggttccatccaatcctagacacgttgtctacgtttggtttgatgctctgctcaactacgtgacagctcttggttatggccaagaagatcatgaaaactttgataagttctggaacggaaccgttttccacatggtcggaaaagacatccttcgtttccactccatctactggccaatccttctcatgatgttggatatcaaattgccagaacgcttgattggccatggttggtttgtcatgaaagacggcaagatgtcgaagtctaaaggaaatgtcatctacccagaaatgttggtggagcgcttcggcttggatccacttcgttactacctcatgcgtagccttccagttggttctgatggtaccttcacaccagaagactacgtggctcgcatcaactatgaattggccaatgaccttggaaacctcctcaaccggacggtagccatgatcaataaatactttggtggccaagttccagcttatgtcgaaaatgtcacagtatttgatgccgatttggctaaggtagttgaagaaaacatcgctgaataccacaagcaaatgaacgcggttgattacccacgcgctttggaagccgtatggaacatcatctctcggaccaacaagtacatcgatgagacagctccttgggtcctcgctaaagaagatggggacaaggaacaattggcagcggtcatggctcacttggcagctagtcttcgtgtcgtggctcatttgatccaaccattcatgatgaacacttcaaatgccatcatggaacaacttggcttgggcttggacttcgatcttgaaaacttgaccctagcaggcttccctgaaaatgtcacagtggttgctaaaggaactccaatcttcccacgtctcgacatggaagaagaaattgcctacatccaatctcaaatgactgcaggcaagccacaagaaaaagaatggattccagaagaagtggaactcaaatctgaaaaagatgagatcaaatttgaagactttgacaaggttgaaatccgtgtagcagaagtcaaagaagtggaacgcgtcgaaggatcagacaaactgcttcgcttccgtcttgacgctggtgacggtgaagatcgtcaaatcctctcaggtatcgctcaattctatccaaacgaacaagaattggtcggcaagaaactccaaatcgtggccaacctcaaaccacgtaagatgatgaagaaatatgtcagccaaggcatgattctttccgcagaacatggagatcaattaacagtcctaaccgttgatccatctgtaccaaatggaagcatcattgggtaaacgataattgtagatgaaaagcactcctgcgggagtgcttttgttgtgacgatacatgtcctattcatctggccggtattctaggatatctcctggctggcagtcgagttctttgcagatggcttcaagggtggtgaagcggatggctttggccttgccggttttgaggatggagaggttggctgtggtgatgccgattttgtcagccagctcattggatttcatctttcgcttggccagcatgacatctagattgacgataatcatggcaccctccttaaatggttagctcattttcttcagcaatctcaatacctctctctaaaatcttgccagagacccagacgattggaacggcaaggagaagccctgtgttaaaggtaaattggaaagtgaagggaaggagataagcatttccactggtttcaagtgtgccagacataaaggacaagaccaagagaatcttccaagctcggttgcaaagatcaatgttggagtgagaaaagatcttttcttggtagagattttggaggaagctgcgaatggtgatgagaaggtaaatatagatagcgcttgaggctagtgggaagagcaactgccagagaggttgcggatgtttggggaagagctggatgccattcgcatcaaaggacaagcgacctgattgaatgagatctttgaaaagccccatgcgggaaagcaggtggacgaccagtgcagccacagtcataaagccacagaagtaaatgaaagccgttaagacttcaatgacattttttaaggtttttgagtttttcatcgcaagcctccttgaagtttatttatttttcacttatagtatactccttataaaaaattagtcaataaaaaagtatcgaaaaacgataaaaaaataatgataaacaaaatattgtttttgaaaaacaggtattctctgctcaaactagtcggtttaagccggggaaaccactacatagaggggaattttactatactttcgatttagggtatactagtgtaaagatcttattccatggaggtagtaaaatgaatcttaagtggaagaaaaaatacctggggccgattttggggctggtcggagcagctgttctgatcggtggagtctatctctactctagctccaacatccaaccagaccatcaaaaggaatttaaccagaccagtaagaaggccactaagccaaaggaaaaagctattgacttgagtggtgactacgtctctaatgaacgggatgaagccaaaatcgagaaaaaaggcaaggcttggaagatcgattaccaaacgtctgatggcaaggtatctgctgaatttagtacggattggaaggtcgaagggtctaataaagtttctacaggcaagatgaaaaagtccgatggtaatacagactttacagtcactgttcgtgtcttcaaatacaagacagataagaagcctttgatcacggtcaccatgtctgataaaaatcctgaccacgagatggtctttgccaatcgggaggattttttcaaatcgacagatccaaatgatgtcgtccttgatggcaatctctcaccgtttgaaggtgcttattccaatgatacctatgaaaaggaaatcgcagattccggttttaaactttatggctatactccagaagagtattaccaaaacaagaccaatgcctttccaagtattgtaaatggggagactggctggactttctggagtggaggcactcgggcgagttacttgttcaataaagaaaaagagcctaagaagcgaaaaggctattatgaagtttatttcactggggccaatgcgactgcgatccaagggcaagagcaaaccttgtacttgatcccagcaggtgtgacaggtcctgatggagtagcttcccaagaacgtcggattctctttggggatgcggcctttcgggattatcatctagagtggtggaaagcttacccacaaccgaaaaaagagaaagacttggatattgcggccattaacggaggcgatttctcaagcttagctggaacctggcgcaatggcaagggagctgaaatcgtcatccaagcagacggaaaagtcaagggccaaggcagcctcaaggctgttgcggactcggataagaagagcaagatcccttatgttgagatgaagatgggtgagactggtgctgcgattggacttttgaaaatcgggttccaaaatccagatggagaccagtctgataccagcaagccacgtctagtggtcactcaatctgcaggcaactacccggctgatcaatatttctaccgtcaataaaagagagtgggacagaaatcggtaattcgttagaattcgatttcgtcgtcccacctccgcacagttgagtagggctgtaaaagctgatgaaatcagcgtagtagagcccactcaaccactgcgtcttgctcgacaatccaaagacaattgagaggctaggacttttgtcccagcctctttttttactgtaagaaaggctcgtggggtctaggaaattgttagtctctagcattaaaaggaaaaatatgcaaaaaagacttgacaaagcaaatgattagcagtattattaactagttaattaactgattaataaactagttaacgaaaatgaaaaagaggtgaaggatgaataggagaagaatgaaggttctgggactcttgtttctcggtttctttctgctgacagcttgtggaagtcaaggaaatgcaggcaagcccccttctaaaaaaggtcttaaaattgtcacgagtttttatcctatctatgccctggtcaaggaaatctctggcgatcaaaatgacatctggatggttcagtcaggtgcagggatccatgattatgaaccctcaaccaaggaagtggcccagatctatgatgcggatgtatttgtctatcattctcagaccctggaatcgtgggccggtcgcttagatcccaatcttcaaggttccaagttgcgagtgatcgaaggcagccaaggaatggcccttgataaggtggctggcttagaggatgttgaggctggtcagggaaaagaagccaagcacttgtatgatccgcatacttggttggatcctgtaaaaatcgcagaggaaggaaagatcatcgcccagcgcttgggagagattgatccaaagaacaaggagctctatcaggccaatgctcaaaagcttgaaaagcactgtgaggaactggtagcccactaccagcctctctttgacaaggccaagcaaaagacctttgtgacccagcatacggccttttcttatctggccaaacgctttggtctcaagcaattggggattgcagggatttccccagagcaagaaccgactgcccggcaattggcggagatccagcagtttgtcaaagattatcaggtgaaaacgatcttcgtagagaagcacacgtcgtcaaaggtggcagatagtatcgccaaggcaacaggggcgcgtgtcaaggtcttggatccactggaagcggatccgcaaaacgataaggatctattagcaaatttagaagaaaatatggcgagtttagccaaggaattagaggagtaaatcaaggatgaagaaaaagggaacgattggattggtagcaactttgggaatagggctatgtgcctatgcgctcagtcagcaaccacaagctaaggaagagaaaaagaatcagattcagtatctacaggcagaaaagaaagcgtcatcgactgcctccagcaaaaaggaagacagcatcgaagcagtcaatgccaaggaaaagactcaggcggagcagattgtcatcaaaattacggatgaaggctttgtcacgtctcatggggatcattttcattactatagtggtaaggtcccatttgatgccatctttagtgaggagttgattttgcgagatccaacttatcagctccaagaagctgatattgtcagcaaggtcaaggatggctatatcattaaacgcgctgggaaatactatctctacttaaaggatgcccaacatacggtcaatgtgcgctcgattgaagagatcgctcagcaacaaaaaggtggcgctaaagaagaaggggaaacaggatcggtacaggcgagctcctcgcacaaggcaggcaagacccgtgacttccgtcaacctagtcaagcgctgaaagaaggtaagactcttgagatgctgacggctaagaaccatacaggtggtggctatcgtacggacgatggttatgtctttagtcctggagatgtcatttcagatacaggggacggctttattgtgccccatggtggccatttccattatattccaaagagtgctttatctgctggagagttagcagcagccctctccgtcttaggtggtcaagccggtcatcaggctgggaactcacacctagctggagcaagcacagagcaagctactccagatcaagcctctccaagcatagggaaacaagcgagcaaccagccgtcagccggtccaaccaatacacagaaaaccccaacgacgtctaaaccgacttcctccaaaccgagtccaaccctgaccaacttgatcgaagaattgcagaaagccccgttgtcttctcgtcatgtggaatctgatggttctgtctttgatccaagtaagattaccaagtggaccgatcaagggattgtctaccctcatggggatcatttccactttatcccatacagctccttatcgcctttagagcgtgagttggcgcggcaattccaattgcttcgtgctcaaggatctagtagtccaacagaaggaagtccaagcttgccttcaaatccgagcacaaaaccagttgatcctgatcatgagcatggcgacagtcacgatcacaaagaggagcacgaccatggtttccacgcagacaaggtcatcagcaaagacgaggaaggctatatggttgctcatggcaaccatgcccattatttctataaaaaggatctttctcctcaagagattgcagcagcagaggcaactctagctggtaagaaagaagaggacaagggtcagcccctgacagatgacgttgcgacctattctcgcgatgcctcagatgaggaaaagatccagtacatcagtaagacctatggtgtccctcgtgaggccattaagatttccaatggtttctttgtctttaacaatccagaccaagaatacgatccgacccacatccatccttatgccgttcggaaggaacatgtccgcatcccacttgaaactggcaatcctgaactagactttatcaatgaactctatgcaacagcgcttcgttcagggatttctccatatagcctccagattgaaaatggtcagtttgttatcccgcatggcgatcacaaccactatatcaaggtacgttcagcaggactagcagactacttagcccaccatcttccaaccatccaatctccttacaaaaaaggagacttggacaagaaagtcgtagaggacaaggtcaaccagctcttagcagaaagccgcagcctctatgcttctgatccattgcaacaaagacggattgagctgatcttgggtcacttcttggaaaatgtcaagagcttcccaagtaactcaacagagggctatctagccagtctcaaacaggttgatgcgcagtacattcatgcgacccaagcggtcaaaccaaaagaagagacagccttggatcgtcgttaccaagaattgctggaacaagtgcgcttgctagacacagaagccttccaattgaagaaggaagagttggtctctcaattgcaggaagcctatactgccaaggacagcaagcgtctagagcaggaagggaagctattagaagctgttcaggagatgcaagatcggacaggtgtgacatcggtcgattacctcaagtatttctaccaaagcttgagcgatgcgcgcttgacaccagaactccgcactaaggcagcagatctagccttgaagctctaccgagctcaagcctttgaagaagcttgggattccaagtctcactttatggagctctaccaaaccaagcaagctattgaccagctcttctcccaagataaaggccaaacctatcctattgaaaaaacagttttggatcaaaaaggaagtcaaactccatcctacaacgtagcggtttatgatttcctcaaaggcttgtatggagaattggataaggcaacagaagcccgtcaacaaaacaagattttgacggctctcttagagcaaatccagtcgctcttgccacaagtcgaagaccaaggcaaacgaacggcttttgaagcaggcttgactcaacttggaaaagaatctaatccagacaaggctattacaagtggggaagcacttctacgcgaaatcagtgatagcattgaaaagcaaaaacaaaagcaaacggaagagcctcaaattggggatgtcgctctttatcaacagctctataaccaattgatggccctgcaccaacaattgcaggacaagggagctagtgatgctgtatttgatcgcttggaagctctctttgatcaattggctaatccaaagagtgataaagcagccttactacaggccatccaagccttccaggctgagttggcagctgcgccatctgcaaacgaagcgaggaaaccagcttctacagctgaaacgcctgtcgctacagaaactccggtggaaaaagaagcagcagcttcagaaggaagcaagcctgccacaactgagacagaaacagagcctgcaagcgcagctgtaacagaagcaagcacgccagatgctccatctcctcagaactaatagaaaatagaaaagagagtgggacagaaattggtaattcgttagaattcgatttcgtcgtcccacctccgcacagttgagtagggctgtaaaagctgatgaaatcagcgtagtagagcccactcaaccactgcgtcttgctcgacaatccaaaaataattgagaggctaggacttttgtcccagcctctttttgcgttctagtgaatattagagatcagtagttgaacttcactccttgtgctccaggagcagtggtgaggaaagctcgactgatttttttcgcttgaaaaatgcggccatttgaactaggatgcggggcaccgtctgccattttttccaagcttgaaagcgggtgtcgatgagctgcttggctaagcgttctagcatttcccgctcagttggatccaaatcttgggcattttggaggatttccttggccttggctagctgtttgagatcggttaggtcattgatggaagtgatgccggcatccagaaaaatgccaaaaaaggtgtcaaaaaacttcttgcgctcctctgccgatgtttcgcgaacccattgcttcaaggtcagatcggtctgctggctatctggactggtttcagaaacggtcacaaagctgtagtccttgatttcccaagtaaaggcatcgtgctgggcaaagccaccaaaggcgtgacttttgacaatggtcgtcggttctggcacttccaacatcatgccaacgatggatccttgagggacaaatcgacgaatgtttggggacgtgcgctggtagccttcggtttcgatgatggccttgttgaggccaggagcatcgtagctgtagatcgcgtcgacccgctcaaataaggaatcaggtagatacgagcaggcataggttgcgagatttccccctttggagtgaccagctactaagaagcgccctttcggaaattccttcatgacatgttgcaggtagctggctgcgcgcttctgagctggaacatggtccatataggtcatgtggaagtcttccttccagccgatcaaggtgtcatccgtccctctgaaaacgaccaaatacgtatccagactaagccgataggtcatggccgcaaactgtttttggatatcgggatcgtattcatcgacatagttaaggagtttgatgttcttaaagcgctttgaagtagtcaactcatcgactaattgcaggtgctggttactcacgatgaaatcggttgtccggtcgatcagttccatcgcatcagacaggcgcactggaatccctgttgtatctccttgaggcacaatgtgttcaaaaggcagataggtcagctctgtcaatgcgagaacatccagttcattgaagggacggtcataaatggaatcgtaggtcacttcttttaggtaatcaaaaatcgtcgacatctgtgcctcccgtgtcttatttctttcagtatagcacaaaaatgggactagaaaaagcaactcctgttatgaagattacgctggatctttttctctgctgcttaatctgttataataggaagaaaaaaagaaggaaagaaagccatgcataaaattctcttagtagaagacgatgaaattatccgccaacaagtcaaacaattattggaacaatggggctatgaagtggccacagtagaggactttatggatgtcctcgggatctttgtcgaaagtgatccccacttgatcctcatggatattggcctgcctctctacaatggttaccactggtgccaggagattcgtaaggtttcaaaggttccgatcatgtttctttcttcacgggatcaagccatggatattgtcatggccatcaatatgggtggagacgactttgtcaccaagccctttgaccaaaatgtcctcctggccaaggttcaaggactcttgcgccgttcctacgaatttgggacagatcaaaatctgctggagtaccggggagccatcctcaatctcaagtccacggacttggtgtatgaaggggaagttatcaagttgaccaagaatgaatttcagattctgcgcgtcctgtttgagcatgcgggcagtatcgtggcgcgcgatgacatgatgaaggagctctggaatagcgacttctttattgatgacaataccttgtctgtcaatgtggcccgccttcgcaagaagttagaagaggctggcttgtcaaacttcatcgaaaccaagaaaggcatcggttacgggttgacccatgaataaatttggaaatattgtttggcagtatgtggtttcccgcaggcgcctgctctatctattggtcatctttttgatcgtcgatttggtctttgcctatctctttccagagacggggaatgtgttcctctatgcgactctagtactaggcttttttagcctctgtgtcttggtctgggatttcgtcataacctttcaagactatcgcaaagctgcgttttatgaggaaatagaggctgcttcgcccttggaacatctcctttatgaaaaatatacagaagaacagcaggcgcgcctggagcaaggcaaagtagcccaggccaagttcaatgacctgatggattactacaccctctgggttcaccagattaagacgcccatcgcagctagccagctcttggtccaagatgtcgagacacctattatcaagcaacagatggagcaggagctctttaagattgactcctatgccaatctggttctgcagtacctgcgactggagagtttccatgacgatctggtcttaaagcgcgtgtcgctagaggacttgatcaaagaagtggtccgcaaatatgccctcttttttatccaaaagaacttgacagtgaacctgcatgatttggatgtcgccgtcattaccgatcgcaagtggcttttggtcatcatcgagcagctcttgtccaatagcctcaagtacaccagtacaggtggaatagagatctatttcaaagaccaaactctctatataaaagacagcgggattggaatcaaaaatagcgatgtcctccgcgtctttgagcggggcttctccggttacaatggccacatgacccagcaatcctcagggctggggctctatctgtctaagaaaattgcagagcaattgggccacaagatcaccctccactcagaggttggccaaggcacgaccgttgccattcactttgaagaaaagaagttggtcatggattagtttttccccatcttacaaaaatgtaagaaataaacgtcaaaatgaaaggttaggttatggtagccgccttttattttttatacaatagtctcatcaaatgaaggaggtcaagaaaatgaaactcttgaaatggatgaaacaactcaaaaagactgagaaaccaaataaccaaaccgatctggaaaaggcggaatttggtcgccaagtcctacaacaaacccaagaatttttcttgatctactagtaaaaggagaaaagtatgtcattgttagacgttcaacacatcaaaaaaatctacaaaacccgctttcaaggcacgcaagtcgaagccctaaaggacattcattttaccgtggaaaaaggggagtatgtcgccatcatgggggaatcaggatccgggaaatcaaccctcctcaatatcctagccatgctggaccagccaaccgaaggacgggtctacctcaatggcacggacacctcaaccatcaagaacaaagacgcgtccagcttccgccgggaaaaacttggctttgtctttcaagacttcaatctgcttgataccttgtctgtcaaggacaatatccttctccctctagtcctttctcgcagaccagtcaaggaaatgatgagcaaggtggagagcgtcagtcgggagttgggcattcaccaactgcttgaaaaatatccctacgaaatctctggtgggcaaaaacaacgggtagccgtagcacgggccatcatcacctcccctgaaatcctccttgcggatgagccaacaggggcgctggattccaagtcttcggctgctttgctggatgtctttgaagatatcaataccatgggccaaaccattctcatggtgacccactcaaccgcagcagcagcgagggccaagcgcgtgctctttatcaaggatgggattctttacaaccagatcttccgcggggaaaagacagagcgtcagatgttccaagaaatctcggatactctgacgatcatggcaagtgaggtggagtagatgtttcgattaaccactaaattagcttgctccaatctgattaagaaccgcaagctctattatccctttgcgattgcggtcattctcgcagtgaccatcgcttacctctttgactccctgacctttaatccccgtatttccgagcttcgagggggctcttccatagtgttcactctcagcttggggttcttcgtggtcaatgccgcaggagctatcatcgtgctctatgccaatagcttcgtcatgaaaaatcgctccaaggagctggggatctacagcatgctaggccttgaaaaacgccatctcatcagcatgatcttcaaggaactcttgctttttggctttctaaccatctcagccggtgtcttgattggagccctctttgacaagctgatcttcgcctttctcttgaaactcatgaagatgaaggtccagctagtatctaccttccaacctgggattgttatcttggtctttgtcacctttggtctcatctttggacttttgattcttctcaatgcttggcgcattctccgtttgaatgccttgcagttgacgcgcgagaaggccagtggagaaaagaaagctcgcttcctgtggccccaaaccattcttggattagcagctctcggttgtggctactacctagctttgtctgtcaaagaccccatcattgcgcttgtgaccttctttctagccgttatcctggtcatgattgggacctacctgctatttaatgctgggatcaccgtcttcttgcatctgcttaagaaaaagaagaactactattaccagcccaacaatatgatctcggtctctaatctcatctatcgtatgaagaaaaatgcagtggggcttgcgaccattgccatcctctcgaccatggtgctggtgaccatctctgctgcaaccaacatctatgtcggtagcgaaatggtcaagaaaatcatggctcctcatgatttctctgttcaaggaaaaggggtcgagctggatcagatcaatcagaaatttgatgaatttgcctctgaacaccatcttaagatcaagaatcgtgacctgatgacctatgccaactttggggtcaaatcacaaaagggcgccgacttcactgtctatccagctgatgaacgcagcgtcactcctaaaactgtctttatggtctttgattcggctagttatgaacacatgacaggcgaacaagtcgatctgacaggcaaccaagtcatcctctttgcccataacaaggcccttaaagggcaaaagcagttcactatcaatgggcaagacttccaagtcaaggaagaagtgagcaaggattttatcactgatcatgtgccaaatcagtttaatatgctgacggaggatttcaactacctgatcgtgcctgacctctcagcctttgtcgctcagtttccaaatctggccatcaataccaatatctacggtggcttcaatgtcaatgtcgatgaagatcagcaactcaagctagcagctagttatgacaagatgatcgatgaattgagcagccaacagggtcaaggaacatttatctatggaggtaaccgagccaatgatgtggcagagttgaatagcctttttggtggcatcttctttatcgggattttcttgtcactgatctttatggtcggaacggttatcgtcatctactacaagcaaatctcagaaggctatgaagaccgtgatcgcttcgtcatcctccaacaggtagggctcgatgaacacgaggtcaaacggaccatcaaccgtcaagtgcggactgtcttcttcctccctctcatctttgcctttatccacctggcctttgcctaccatatgatccgactcattcttaaagtcctcggtgtcatcaatagtggccaagtcctcgtcgtgaccctcagcgtctgcgctgtctttctcatcacctacctgatcgtcttttggatcacctctcggagctatcgtaagattgtgcagatataaggaaaaagaagctcgaatcaaattagaaactttccttaggtgagtacggacgtcagcaaacttcgaagaagttccatgactaattattgagcctaaggtctcaataattccgagtgcctgaaacatgattatttcaggcacttttctcacagcggaaagtttcaatatactctaaataataatgagaaatcattttgagatttttgtacaatagtccagctaaggttattcaaagaaaagaattgtcaatttttaagctcgctcattgcgggctttttgtttgaaaaccgatgcgattgtttttgcttttcaaagggatacacaaaaaagactgaaccagtcgagttcagtctttgatcgatttctattaaagtgatgtaaggaaagtcaatccccctaggatgacacctgctgaatttggaatgatcaaaatccagtcttttttaggttcctttgtccaaccataaatgacccagatcaagcaagaaatagcagctgacaagggttggaaaggttgggccttatttccctgtaaattagcaataatttgtgggatgtaggcaatgaaaacgataatcccaataaaggcaccgatcgagccaacgatttggttgattttttgtttattcataaaattttacctctgtgtatcaatatagcataagtaggaagaaaatgcaattaatttgcatgctatgcaagatgaaaatgattacattcgcacaaaattagacaatgtgtcaaaaaaatagcaactagagagaagactctctcgaaaagaaatccatcttcctgcaaaatcacaagattgtgacactttacagttcggtaacatttgaaaaaaagacttgaatttgtaaaggacaaaaggtagaatagtgcatactttaaaaaaagaaaaggaaatggtagtttcaaaatgaatgaaaaacaaatgaaaattcttggttgggttgcgacctttatgtctgttatgatgtatgtgtcttacttcccacaaatcatggataacctcgcaggtcacaaagggaactttgttcaaccccttgtcgcagccatcaactgtagcctttgggtttactacggactcttcaaaaaagaacgcgatattccacttgctgcagccaatgcaccagggatcatctttggtttgatcacagccatcacagccttgtaatcaatgaaagagagagtaggacagaaatcggtaattcgttagaattcgatttcgtcgtcccacctctgcacagttgagtagggctataaaagctgatgaaatcagcgtagtagagcccgctcaaccactgcgtcttgctctacaattcaaaaacaattaagaggctaggacttttgtcccagcctttttttgatggaatgaatcatttccatggtataatgggaggactattcatagagaagatcaaaaggagacaaaagtggagcaaaaacatcactgtcaagtcctatgggcgaaaaataaatacctggtgctcagtcgttcgagtaatatctacaaggaaatccgggaatacctcaagcgagaccaggtggaggtcagccacgtcgaggacctgatccagcaagcgctggccttgccagaaaatcgtggccaggtctccaatgcctttcagcatatctggggctatttcaaaaagcaggcgactgcagaggaaaaggcggactttatgctgctacttgagaaataccagcatggccaagcccagcaagaagatctgatcaagggaatccagactctccttgagcgctacccgaatcgctacttacaagattcaacgctactaggaggtcaatagatgagactctggcaccaagacttgattcccaaactccctcgtccccagctcctgggtcaacaccgggaatgttgcgcccttcgaggtaatggctggggcaagaagcacgcgacggtcaactatgtctttgactactcgccctatcgcctctatgcctatcatcatctgatcatggaggagatgaccgctcgtggctataaggtcagcccagagtggtgggagtcgacctacagaggaaagacctgcccagcctatccagagctgaaagaagaagccttgagcacccctatctatcccgagcatcaggacacttacctccaagaatgcttagacaatctagcagaaaaagggattcaactcgactaagaaaaaacgaaccagatcaggttcgtttttttgcgccaattcccaacaaaatgctttgaaagcgttaatttctttcccaaacatgctataataataggagattatgcacaggaaaaggatagacggatgaaggcagtagcaactccagaacttgagattgaaagacagttgatccagcagttgacttcaggagagagtcagtggacctatcgcgaggatctcaagaatgaagaccagttgtgggacaatttctttgacaagctcgcgcaaaacaatgtcgccgtgctggcggaccatcccttgaccgaccaggaaaagcgccagatcaagaaccagcttaactttgtcagctattatgaagcagccaagtggcttgctggtgaaaatggcatcgccaaggtagaagtccagcgtgaagatgctagtctaggcaccatccgtctagcagtcatctggcgggacaatatcgcagctggtaagtcaagctatgaagtggtcaaccaagtcgaacgcgataaggcttatccgctagaccaggatcgacggctcgatacgacccttttgatcaatggcctgcctctcatccatatcgaactcaagagtccacgagtggcctttctagatgcctttcaccagatcaaaaagtacgaccgtgaaggcaagttccggggcatttactcgagcttgcagatgtttgtcgtgaccaataaggtcgacacacgctatattgccgcagcccgtgaaagcaaactaaacaagcaatttttgaccaagtgggtggacaaggacaaccagcccatgatcgatctcaacagctttgctcatgaggttctctccatccctcgggcccaccagatggtcatgcagtactcggtcatcgacgatagcaagaaagccctcatccttctgcgtccctaccagatccatgctatcgaggctgtgcaggaagcctctcgtcgccaagagtcaggctatatctggcatacgaccggatcaggtaagaccctgacctcttacaaggtagcgcgcaatctcttgcagatcccagcgatccaaaagaccatctttgtcgtcgaccgcagagatctggaccagcagacgacttcatccttcctctcttatgcggccaatgatgtcatcgacatcgacgagacggacaatacccatgaactggtcaagcgcttaggaggcaatgacaagcgcgtgatagtcacgaccatccagaaaatcacgaccatgatgcgcaagtttgaagaagggaagtaccagcgggatgctgggaagatcaaggacctgcgcgtggcctttgtagtggatgagtgccaccgggcggtcacgccacagacgcaaaaggaaatcaaggcctacttcaagaactctctctggtacggctttacagggactccgatctttaaggaaaataaacgcaagcaagtgggagacctggctcagaccacccaccaacagtatggcgatcgcctacatgaatacacggtcaaggaagccatccatgatggagcggttctaggctttaaggtagactaccgcaataccatcatctcagatctgctagaagaagagatcccaaaccaggcctatgaggacaaggagcacatgctagaagtcttggatgccatcctcaataagagccagcaacagctcaatatccctaaaggggtagggaaaacctatgaggctatcttgacggtcaagtccatcccacgagcacaggcctattataatctgctcaagagcattctcgctggcaaggagcgagtcaaagtctccgaacgggtcaaacaacacctacctgattttccaaagtttaccatcacccactcagtgtctgaaaatgaggaagagtccatcggttaccaagaccacatgaagcaggtcatggaggactacaaccaagagtttggtacgcattttagcctagcggatctgcggggctttaacaccgatgtcaacaatcgcctagccaggaagcgggacaaatacctctaccgcaatgagcagttggatctggtcatcgtggttgaccgtctcttaacgggctttgatgcaccttgtctttctacactctttatcgatcgcaagccaatgcgcccacaggacttgatccaggcctttagtcggaccaatcggatctttgatgacaagaagcacttcggccatatcatcaccttccagcgtcctcaagcctttaaggaagctgtcgacaatgccctcaagctctactccaatgggggagaaaatgaggtcctagcaccaagctgggaagaagagaagcgcaacttcttaaaagcctgggcagagtttaaaggccaagtcacagactttgaagaagaaggagtcaccctcgagcaggccccaacagcccagctccgtaaggtcgctaaagcttatcaggtctttgacaagtaccaagcctctatccgcgtctactcagagtatgataaggaagagatctatcgggaaacaggcctcagcgacagccagctcgaagcctatctgggcctctatcaaaatatcctggcagagatcaagagcagggatccagaagtggacagccaagatgagctggatatccactatgagctggaatctgtccaagtcgatgagatcaactatgcctatatcctcatgctgatccagagcatgatccagcaggaggaagataacgagcagaccctgagtgacaaggatatcgcaaccgtggatagctatatcgagagcctgaaccggaccaatccaagcctagcggagatcatccaaaacctttggacccaagtccaagaagagcccgaacgctaccgaggacaatccatcactggagtcttggaccagatgattgaatccgtcatcgatagccatatcgtaagcttcgccaaacgctggtatatcggagctgacgaactgcgctactatatccaacactaccgcaagggtgctaaaaaacaagccggcgaaagccagctcaccaagagccaacgctacaaagactacaaggcagaagtagcagatgccctcaacccactcagctataaaaaacaaatcaaagaagcctatacccaactgatcgaagaggtgattgaaccactaagagtggggaggtaagagagaatgttatgtgtaattatccaaatgaaagattgtttatagatttttttacagatgatatgcttaaagaattgggtgtagtgtcgattaaagatcttaattttgaaaaaggtagttttaggatatcgacaccaatcaataatctagaatgtttcaacgaaattgacattagtaatcctataaattttgggcttaagaataatttacctattggtggtattggaaatatatctttaagttcaataagtgaagttaaaggaagaggtccaaaagggacttcgccattcaaagaaacaggatttgacgctggccatattttaggtaggcagctttttaagggtactcgttttaatactagtaagaagaataataaaaatatatataagcaaactaaatggtcaaaccagggtaatcaccacactgctaaatgggggcataatcaaacctactttgagaactatattgtatatcaaattaaaaataaaaccccagatgcagtagtaaaataccgtgctgacttaatatacggtaattctgaggagaaagtaccaagaggtatccatataagaagtagttgtgagcaaaatgaagaattgaatttcaatgtttttgtaccaaatgttgagatagaaggacgtataaattataacaataataatttggagattgtaaaataattggagattaatggaaatgaacattcaatattttaatgtttttttgtgtcgtaatggtgagaagacaaattatgatttatctaagttaattgataaaattcgagtatcttctcctgtagaaagaactgtaaagttagggagtcagcatactatgtttatgaataatagtagaaacccttcaagtagcaggacgagtggttcttctttggatggtttagagtatctccctagaaatagaacagtttggattggtaaataccgtagtgaaaaaccatatgaaggaaagattggtgaagaagaaattaaacaaattgacggagacctttttgagcctagtgtttgtttgattattcctacatcttatctatttttaatggaaagaaagtttttagggccttcgattaaccaaataggagagtatttatcaagctttataaagagtaaagttcctaatgtaaagtattcggtgaaatttgagcctatgaaaacagatagtttaaaacctttgatagaagcttctgagagcatcaaatcaatcgtgattcaaattaaaaatgagggttttgaattgtcaagtttgtttccaaatattaacgacagcaacaaatcacttttagaaaagttatttggtaatatgatggaagtatctgaagaattagatataaatacaactactgtagcatttaagaaaagtcggtataaaagagaaatggatataaaacgtgttgacagtatattaaagttattaaattcttcggataaaaatttaatatctgcaaaagttgaatttttaaatccagagacacgtagagttgatgaagtggatttaaagaacgatggcttttatattttggaaaaaacttctttaaaaaccgaggattttaataaattagctaatctaatgacagagcattattatgatgaccagaatcgtaataaagatttcaactatacctcatttggttctttgttatctgttgatgagaatgaatttgaaattgtaactgaaaatagcatataaaatccaaaactagaaaggagatgttggcatgcttaaatttattgataaatatttttggtggagtttattaagcataattgtgttaattgttacaatgtctctttttttaggaaattattcagagttatacgattggttttacaaaaatgcttatacagataatacgaatttagtaacaatctcaacagtttttattggcatttatttttctttatacggttttttattaagttcagataaaaattcccttatatcaaaactaaagttaaaagagtataagagactagtttcaatagttaataaaggatttttatctagttttattatcgttatatcttctttttttaatgaaaatatctataattgggtgggtgaaatttatatattattcctgttttttatttttctcttacttattggttctgcaattcaaatagctatttattttacattactttttagatatgatttgaataaaaaatataatagttttgaggaagatatacaaaaagagattctagatgatgaattgcgtaaaaagttaaaacaatttttagatagagagttatgagagttgaggataagaatgaaacctaaaattatttttagtgaggaaaagaagagttggattaaaagacctttattatctaatatagaaaaaataatagattacaggggtagaacacctaaaaaattaggtttaagttggagtgatacaggttatctagctttatcagcattaaatgtaaaaaatgggtatattgattttaatgctgatgcaaattatggagatcaagaattgtatgatcgatggatgggggataatcatcttcataaagggcaagttgtctttactactgaagcaccaatgggaaatgttgcacagattcctaatgatgatttatatattctaagtcaacgtacgattgcctttgaagttaaacatgatttaattatagaagattttttagccactttattacgaagcccaaaaatatttaatgaattaacttctttgtcaagtggaggaactgcaaaaggagttagtcaaaaatctttgtcaaatctcaaggtttgtgtacctgcatcattagaagaacaatccgccatcggttccttcttcctcactctagacgacctcctggctagctacaaggacaatcttgccaattatcaatctctcaaagagaccatgctttccaagatgtttcctaaagctggacagactgttcctgagattcgtttggatggatttgaaggggagtgggaagtagttagcttaggaacattgatagaaaattatgacgagataatatcaggtgaatcaggttttcctattgcaacatcttctagaaaaggtctttatttacagaatgattattttgaaggtgggagaactggaatagatttgacacttgattttcatagagttccaatgggctatgtcacttatcgtcatatgtcagatgattctatttttaagtttaataagaataattttgaaaatgatgttctggtttctaaagaatatcctgtatttattagtaatgatagctctgatatcgatttcctactttatcatttgaataactctaggttatttttaagattttcaactatgcaaaaattgggtggtacacgcgttcggttgtactataaaaaccttattacttataagcttgcagtaccaacacttaaagaacaacaagccattgggagctatttctctaatctcgataacctcatcattacttaccaagaaaaaatttctcagctagaaactctcaaaaagaaactcttgcaggatatgtttgtttaaggggggagttatgtatagttctaaaaaagatttaattgaaaaaatagaatcagaaaaggaaaggtttcaagataagagtcaaatagccgattatgaaaatgaattatatactagagtagaaaattatttattaacacttattgatttaataagtaaagagttagatgatgaagttttatctaataatgtaacagtaaagtttaaaacattacgtgataatttgttagaaagcatgtacaattgttttggtggcaatatttatctgtatgatactatgcttcctcaaattctagagaatattaaaataattaagcttttctctttcatttctaaaatagattctactactgttattataggagcgaacggggcaggaaaatcaagtcttattaatgaattaagaaagaataatagtaatgaaatgtatgtcttaccagcccaaaaattgttatattttgtttcaaatatccatgatcgtaatggaattactagagaaagatatatccaagatttaaaagaagtcgatcttaaatatgacacaattgatttacaacctatccaaattgataaggatttttcaaatactttcactaaattaataacatttttgataaagaactatgctaagatagcgacttataaatctagagggatggaagggttatctatagctttatgggatagagtagagcaggtttggaattcaatatcacccgaaataaaatttatactagaacccgataatagagttgttgaagttgaaaaaaatggctctagatatagtataaatggtctaagtgatggtgaacgttgtatactgttttatataggaaatgtacttcttgctcctgaaaatagttatattattgttgatgaacctgagactttcttaaatgctgctgtctataatgaattgtgggatttgctcatatctcagcggtctgattgtcaatttatttttgcttcacataatatggactttgtccaatctagaacaaatgcaagttacatatggtgtaagaaatttgaagcaccttatgatttggagtatcagattttgaaaggtacacaagaaatgcctttatccttattaactgaagtatctggtacaaagaagccaattctattttgtgaaggaactaaaactagcatagactatcagatttattctaaattatttagtgaatggtgttttgtaaaaccagttcaaggccataagcaagttatccaatacacaagagcctataataaattacaatatttgcatgggaatatagcttatggcataattgataatgattggatggaagaaacacgtattgagaactataaacaaaaaaatgtttttgtgctcacttttaatgagatagagatgcttttagttgatgaatcaatagtgaagtctattcttagctctgatgaacaggataaagaagaaaaattaaatgaattccaaaaagctattaaaagttattgtgtgaaaaataaagacaagataataagtatcgctttgaaaaagaaacttgatgaatttatggaaggtaatttgataaataataatgaaccaacaagggatgatgctgaaatatttttagagggtttatcaacagaattcgatttaacttcaaaactaggaaatataactaaaattgttgaggatagcttagatgcttcagatttctcatcaattttaaagatttgtaacctaaaaaaagaaataatcaatcaactaggaaatacagtagtcactcacgattttaaaaataaggcattaagtaagattgcaacagattcagagttgcaaaatatattgagaactaaatattttagtgaacttgtaactctactaagtcataaataaacgtgatttatttgtattattctccagctttaatactaaagaaactcttacaagatatgtttatctaaccttcaaaagttccctttatcagcatctataagcacagcctttttcgaatagtataagtaagcccctttgatcctttcaaagggtgctccttagtatttaataacttaaaagtatttacatttaataactttagagttataataaattcgaaaagaggttgctttgtgcacgctatttatttttataaggacaaacaagggaatcaaccagtcttggactacatgagggagctagctcgtcacgatagcaaggacagccggatcaaactcaacaagctcaacgactacatcgagcttttgagccagcaggggacacgtgcaggccaaccctacatcaagcatctggatgcggagatttgggagttgagacctttacgtgatcggattttattcgtggcttggctggatgggagctttgtcttactacatccttttgtcaaaaagacgcaaaagacacccagacgagagatcgagaaagccaagcgggagttgcaagatttgaaggaaagagggctaagagatgaagaatagtgccatcggcagcaattggaaagatgtgagagcagagctcttcaccaaggaagaaatcctagaaagtgatctgcgggtcgcgattatgacagagctgatcgaggctcggcatgaaaagggcattagccaaaagaaactagaagaactcagtggggtcagccaaccggtcatcgctcggatggagacaggaaagaccagtcctcaattggacacagttttgaaagtcttagccagtttgggcaagaccctagctgtcgtcccactggaacaagaaaaggtctaaaagaaatcagaaagaattactatggaaacaacacaaacctcccagtcgctctaccaagccctgtggaactcagcggacgtgctccgctctaagatggatgccaatgactataagtcttatctcttggggatgatcttttacaagtacctctcagataagttgctcttcttcgtggcggagaccatggaagaagagacagagagcttagatgaagccttggcgctttaccgttcctactatgaggatccagactctcaagaggatctgatctccgtcatcaccgatgagctcaactatgtcatcaagccagacttgacctttacggccttggtggaccgggtcaatgaagggaccttccagctggaagatctagctcagggcttccgagacatcgagcaaagtgatgacctctatgagaatctctttgaggacattgatctctactccaaaaagctaggggcgacacctcaaaagcaaaaccagctggtggctgccgttatgaaagaattggcagtgctggatgtggcaggtcatgcgggtgatatgcttggggatgcttatgagtacttgattggtcagtttgcgaccgactctggtaagaaagcaggtgagttctatacacctcagcctgttgccaagcttatgactcagatcgcctttttagggcgtgaagacgtgcagggttttaccatctacgatgccaccatgggatcaggctccctcttgctcaatgctaagaagtattcccaccagcctcaaacggtccagtactttggtcaggagctcaatacctctacctacaacctagctcggatgaacatgatcctacacggggttccggtggaaaaccagtttttgcacaatgccgatacgttggacgaagactggccgacccaagagccgaccaactttgatggggtcctcatgaatcccccatactcagctaagtggtctgcgagctccggcttcctccatgatcctcgcttctccccatttggcaagctcgcccctcaatccaaggcagacttcgcctttctcttgcacgggtattaccacctcaagcaggacaagggtgtcatggccatcgtccttcctcacggggttcttttccgtggcaatgctgaaggaaccattcgcaaggccttgctggaagaaggggccattgatacggtgatcggtcttcctgccaatatcttctttaataccagcatcccaacgacggtcatcattctcaagaagaaccgcaccaatcgggacgtctactttatcgatgcttctaaggagtttgacaagggcaagaaccagaacatcatgacggatgcccatatcgagaagatcctggaagcttacaagtcacgtgaggagattgataagtttgcccatctggctagctttgaggagatcgtcgagaatgactacaacctcaatatcccacgctatgtggatacctttgaggaagaagaagtggagccactgacagagatcgtggctaagatcaaccaaaccaacgcaacgattgagacccagactgcttctcttctagacatgctcagccagcttcatggaacgacaccagaagccgatgccgaactcaagaaatttgtccaagagtttaagggctagggtgtgaggagacagggagtaggtaaagggtactctattcgctatttccccaatttttttcgaataatagaagtagagggaccttccctctattttttatcgaaaaggagcagggatgcagaaaagacatgcgcatgtatcgccaaccttggatatcatagccaagaagatttttagtttgccggaggtgacggcagcatttattcgagatattttggatctggatgtagcggacgctcagattgtggaaggaagccagccccacagcatggcctatgaggaggatgacctgttctccactgcggtggatgtgagggccaagctccacgacgggaccgaggtgatcatcgagatccagattcgcaagcagcagtatttcttgaatcggttccattactatttggccaatcagctggtggaaaatgtgcaaaaattgcgccagcaaggccagacacataagatgtacgagcagatggagccagtctatgggattgcaattttggagaagtcgctcttactggacgaagaggccgccatcaataaatactggctgactaatagcaggtccggcaagcaactcaaggcttattataagaatggcaagcatcaaaatcttttgcaggttgcctttttagagctagacaagtataataaagatgagaacttgactgatgcaggcagacagtggctggagttttttgggaatcttccctttacaaaagctcccagtcaggccgtcgcccacgcagattcattattagattcatctagctggaccaaggaggagaagaccatgatagacgagcgtattcggattcaagaaaattatgatatgaccctggagacagcgattgatgaagcgcgagaagaaggtttggagcaaggattggaacgtggtctggaacaaggtttagaaaaaggcctggaacaaggtcgtaatgaagaacgtctgcagttaatccgcaaaatggtctcacgaggaatgacacctgagcttatctcagatatgacgggcttaaccattgaagaaattgaggctcttctttcctaagtcataaacggaggcaccgcctcttttcttttttgaaaaaaattgaaaattttcccattttttcaatccgcctttctagaattgtggtagaatagagtcaacaaagagctatcctcaccaacagtgtgatcgatactagaaaagaggattctgatgacaagaaaaattggtattattggtttggggcatgtgggtgcgaccttggcccacagcatgattttgaaacacacctgtgatcacttggtcttgattgataccaatgagaaaaaggtcaaggcagatgccttggatttctgtgatacagttgccaatacggggtatccggttcatatcacggtcaatgactacgcggctttaaaagatgcggatgttgtggtgtcgactcttggaaatatcgagttgcaggctaacaacacagatgaccgttttgcggagcttccctttaccagtaagcaagtggtgcaagtggcgcgtgatttgaaggcttctggctttagcggggtcttattggtagtgaccaatccggtcgatgcagtcactcaactctatcaacaatataccggccttccaaaagagcaggtgattgggacagggaccttactggatacagctcggatgaagcgcgcagtcgctgatcgtttgcaggtttctcctgctagtgtatcaggctacaacctcggtgagcatgggaattctcaatttgtcgcttggagtcaggtccgtgtcaaaggacatgctattaccgatctcttctctcaagaagagctggacgccattaactacgaatccttgcgtggtggtcatactgtcttttttggtaaattctataccaactttgggattgctgcagcagcccaacgcttagcagaagctgtgatcaatgatagccacgaggaaatgccggtctctaactatcgtccagaatacggaacttatcttggctatccagcgattgtaggtcgaaaaggaattatcgaacgattggacttgcatttgacagaagaagaaaaagaaaaattactccattcagccgaaaccattaaggaaaacacacgaaaagggctggagcatgcataaaagagaggaggctgggacaaaagtcctagccttttaattgtttttggattgtcgagcaagactagatagcgggcttgaagtcatcattaattggattgtaaagatctctggggtttgtttttcttggatgttgatcctctatagatttatacggttatgatttattgaaggttggctattattgtccaaccttttttatctgactctttttaggattcccctatcgaaatggagtaaaagttaaaattccaagttgtaattcttgacattacatctagggcatgtataatagttaatataacaaatattcttacaacagaaagagaaagcaactatgagaaacattttatttatcgtcggatcccttcgtcaaggatctttcaaccaccaaatggctcagaaagcagaaagccttcttgaaggaaaagcaacggtgacttacttggactacaagggcatcccaatgatgaaccaagatttggaaacgccaaccttgccagctgtgcaagcagcgcgtgatgcagtccttgctgcggatgctatctggatcttctcaccagtctacaactttgccattccaggtgtagtgaaaaacctgatcgactggctcagccgtgcgcttgacctatcagaaacacgtggtccatctgccctccaagacaagatcgtaaccgtctcttcagtcgctaatgcaggacacgagccaatgtttgcggcttaccaagcactcttaccattcgttcggactcaagtagtgggtgacttcacaggaacaaccgtgaacccagaagcctggggaacaggtgaattgatcttgacagatgaagcagtggaaggattgaaaaaacaagcacaagctctattggaagcataagaaaaagtccattttggacaattttcttaaaaatagagaaagtaaaaaaactcttaagaatagcgctatatcagcattcctaagagttttcattctatggtgtccaacctacaaaatggcaatgtttctattgttgctagggtttgtctacgttctgaaagctgagacaaaagtttcagcttttttagatactaaagagttgtccaaagaaataggttactcccatggtaaggaggccaatgatcaggttgcgaagcatggctggcttggttggtgcttttcctagtttcgcactggtatagccagtgaagatcaaggatagtccaacaacgaagactgtcactggaatgcgatagttagctggaaagagaatgatagagagcattggaggaagggaaccaatagaaaaagcaaggaagctagatgcagctgcatgccaaggattggtaaattcttcgtattcaatgccgtatttctcttcgaccaaggctttgagggggtgtttcagaaaggcgcgctctgtcagaatttttgctgaagtttcgcattctccattttcaagataagcatggtagagagagtctctagctaactttggatcgcgatccaataaggcttgttcgcggttcacagcagcttcttccgtgtctttttgtgtggaaacagaaacatactcaccacccgccatcgaaaaggcaccggccagaattgcagacaagccagataagaaaatgatccagatgttatgcgtggcactggccaccccgatcaccactccagcgatagaaatgattccatcattggcccctagaaccgcagctctcaaaatattcaagcgatcgctaaatgattcatctactccatgttttatttcagtcatacaatgtctccttttccttatttagaatgattataaataaaatacagaaagaaatcaaggattttaactcaaatgataaaagttagacaatttaatggaaccttttagttgtaaaatttgacattacaagcaaaatggagagagaatttgacatacacctatcctatcaaggtttatttagcagaagtgcataatttttgaggatcctgatggcattctaacgcgagtgcggaaaggataacaaaaaacagcaggcttcctgctgttttttgacgagataaattagttggtttcattatcttttcccaccacccaaaataagagaaggagttggaaaatacctaaggcaaataaggtcatgaaaccattgcgactgcctttagctgtggcttgggtgaaatccagcttttgattggcttggctcatggcaacgatcaaggaagccagagttgttccaacagcacctgcaaattgttgcaaggtattaaagattgcgttcgcatcgggttgctcttccagagagagttgtttctgtccgtttgtcatgatatttccaaaggcaagtcccataccggtcatgaagagcatgtaaaagacgagaatcaaaccatttgtcagcttcaggcccaagagggtgaagtgaaaatgggccagaaggatgaaagcagcaccaaggaggatcggtttgcgggcccccagtttatctagaatcagaccagagaaaggagcaaagccagctccaatgatggctcctggaagcagcatcaaggctgcaagcgtagtgcttgagtggttgaccaattggatataattaggaagaagaaaactcatggcaagagagcctaattgaaaggtgaagaaggctagaatatggccagtgagacgatgatttttcaaaatagaaagattgataatgggagtctctaactgattggaccgccagaccaaaaggaccagtcccaaggttccgatcaccagccaaccaagcacagaaaaactgaaaaacgcatgatccgctaggccatgaatacctagaatcaaccctatgaaaagggcaatgatggcaagaaggctcacgatatcaaaggtttcccgcttgactttactgatttgctcaatggagcgaagtcctgcaactagtgaagctagaaggatcgggaattgaactaaaaagatggaccgccagccgaagctagctgttaagagtcccccgacagtaggccctatagcgggtgcaatggctgtaatcaaggtccccactcccatcatgagaccgatcttacgttttgggacttgttctaaaatgatattaaacatcagagggagggcaaaaccaacccccattccttggaccaatcgccccaggaccacaaagccaaaatttggagctaagaagtcgataagaacacctaaaacagataggagatttccaactaaaaagatggacttcattttaaaagaacgcttgagataagcagataaggggaccacacaggcaaccactagaagatagatggtcgtaacccactggacggttgcggtgttgatttcaaattccttcatcaatattggaaaggtgatgttcatggcagtttctccagccaccccgcaaaaggacaggatccctgtcgcaaagatcgcgaacaagaccttggctgaaattttttcttgtgacatagacgtctgattcctcctaaatcttcctataatgttgtaaaaatggcctgaaaatccatcgtagcgatctcatttcccgtcaaatccaattgctatgagcatagcaggaccgacgttaacttgattcatcgttttgttagctaacaaatagtatagaggaaatgaagacccctgtcaaagagtttttcaaaaattatgaaaattttaaaagtattctcaacagatggtaagttgccaaatgaaagggattgctcaccactatgatataataagaagaaagcaagcaacgtgaacacattaatagggggcgccgtgaccaagtatttagtccagaagtttttctggttacgagaaaaaagtttgattcaaatatcccagaaaaccctggtttccttatttccttttttcttattttcaggaatcgttcgagtgattgccttatcggtcttttccgatcgaggctatatccaccagctcttttcgatggatagttggttgccatgggatcaagctatcagccaggttcttattaatttttccaactttctaggaggtctagcagggcctttagcaacctacttcgctgggaaatatacagctgggcactatggtagaagtacaggaacagccggcgtgactgctcttttggtcagcttgattgtagggtctcaggaattgttggtgggaccactcaatgatgggcaactgacgcgaattaacttacctgcgacgaccaatatcctcttagccattgttttaggctatctaatcggacagatctttcggctatctaaagccagtgacgatcagattgtggacaaagactttatctatcagcccaagactgtgcgtcccattttcttgtccttggttctaggggttagcctgaatattctcctccttcttggcaatcagtaccgtatttttcaaatgatcggtcaattctttagttctctgactataagcagtcatcatctcctgtccacctttgtcatgggactcttcagtggcttatcagcttgggtcggcaacagtcaggcttttgccctaaactcaattgtggatgacagttttgctttagaaaatctgaattacgctgtgactcatcatacaacgacggggattcctcatctctatactttgaccaatttgtatcggagttttggcatggtagctggaattggcgctgtcctagcacttttggtagcgatcttactggtctcccacagtcgaaaggacaagaaagtcagtctcctcagtatttttccaggcctctttaataacggtgcccccttcatggtagggattccggtcctgctcaatcttctatatgtgattcccttcttattgatccccttggtcaatatggccatcgctgctgtggctttgtgctttaagcttatgccagcagccgtctatccagtgccagatgggactccgagccttctctatgctttcattggaacgggaggaagtctgagagccttagctgtgagtatactttgttttgcgatagatgtgctcctttatctaccatttgtccgtatgggaaatcgtattcgaaaagatctaaaagtgaaaggagaaagcgatgaaagtctctaaaaaaacagccatcgtcctcactttggtctgtcttttcttgatcggtttagccattccttcttatagctggactcgaaccaatgtttcaaaaatcgagaaattttataattccaaactgtcgcccatcattatgattccaggaagctcagcaacagagaaccgctttgatggcttggtgaccaagctcaaccaaggtcgccaaggaaccaaacacagcctgctcaaggtcaaagtttggaatgatgggcatatcacctatagtggaagtattgatgccaaggacaatgagccagtaattgtggttggttttgaaaacaacaaagatggctatagcaacattaaaaagcaagctaaactatttaatcaagccttcgaagcccttcaagaaaaatataattttaataattttaagggcttgggtcattccaacggtggcttgatttatacagcctttattgaaaattacctgggggattacgatgtggatctcaagaccctcatgaccatcggaactccctacaatttcacggagaccaatatcaaaaataaatctgagatgttagctgactttatcaagggaaaagaagctatccccacaacccttcatatgtattcagtagcagggaccatcacctatgattcagatgagttggtcccagatgccagtgtttctgctgggaaatatatctaccaaaaccaagcagctagctatacggagattacggtgacgggggaagatgcccagcactcggaccttccaaccaatgatgaggtggttgccttggtgaaagagcatattgaaagtcaaacggatcgtcgagccaaaccgaataaaataaactaagtgtgaagaagggattccttcctcaccttttttttagtataataaagtttagtatgaaaataagggagattataggaaataagatgaaaagaaaaaaatgggtgcagttaggaatagtggcttcgagtatggtcatgttaacaggatgttaccaaagataccaacgtcagtccagtcccaaaaaagaggctgcaacaagccagacttcagcaaagaaacaagcgaaaaaaacagataacaaacaattatatcagtctgttttttcagactaccaaaagatttttgccacttcaaatgatttggatgctatttccaaattaaattctcaattagccaaagaagatcgaatgatcaatagctgggtgatcgagactgtcatcaatcagccagaagccgttcgctatgcctttaaggacttaaatagcgatggggtagatgagatgatcatcgccaaccagcaaaccgatgggagctactttgcgacaggagtctactacctcaaggaccaaaagccgaccttgcttgcagaaggtttcgttgctggacacggaggagcgcgcaatgcgacaaccctctataagggaggagaagtcctggaagtcagctggttgtcgggaactggccgtggtgtagccgtgctttcacgaatagaaaagacacctcaagccgcgacaaaagtccaggaagaagaagttcaggtacctgggtcagatctgaatgccctctttggaaaatctgatgaggataaactggatctcaagagttttgactggcaaacctttgaaagcacaccatcaggaggcgatacccaaagccaggggaaaacgccatggaatgctgaaaaatcagcaaaattagcagaatttatgaagacctggggtcaaaagatggggcaacccaactaccaaaaaggcattgctggcggtgatgtaggaccagacaacctctatactctaggggacaatagcaagatggatgctatttatacagatactggtcaaggaaatgcaaaataccgaatcgtagaacgctatagcaattgggacaagtatccagatgtgcatagttatttctttgccattacagatacaggagaggggatcgtctttcattccccaacgaccaatggtggaaagatgtacctaaaaccaacagacaacaaggaacttcaagaagaatttacgcaactgcttcatcaataaaaagaagaataaaccagaaaacgactgtttttctggttttgtttatcccaaacaatgaataaaaatacaaaataaacgatatttttcaggatagaaaatatgttaaaaactagtgataattagcggtatacaagtgtttaaaaacagaaaatgtttgacaattaaaggaaaatcatttaaaatatattcattctttatttataggagaaaaaatatgaaaaaacttcttacagccggtgtggctctcttgtcagttgcaacgttagcagcttgttctggtaaaactgcttcagaatcatcaagcaaagatgcaaaagcttcttctagcaaagtagaaaaatcatctacttcagaaagcaaatcaagcagttcatcaaaatcatctaaatcagcaacctcttctgttaaaattccagaaattgtcttgttgactgatgatgaaatcgataatgccaaaacaattggtgatatgaaaactctttatagtaaattagtggataactataaaaaatatgctcaagatattggcgatcaaattcccgaatcactgagatctaaatatactcaacaagtggaaccagctctcaagacattggacgaatcaaaaactcaatttgatacagcactttcaactggtggttcagatgatacggttgttcctgaacaagggcgtactgtttttgtacaacaattgaaatctggacgtgacactatgaaacaagctcttgaaagtgcatataaatcaattgcgccattgctctcttcatcagctgaataatcaatgaaaaaaatagggtaggacctcaagtcctagcctatttttgctttcttacaaaaatgtaagaaataaagggtaaaatgtaaggttatgttatggtgaaagcgtttcagttttagtacaatagatttgtaaaaaacgattgaagcttttatcgagctagaaaggaatggaccatgaccctactagacgttcaacatatcaaaaaaatttacaaaacccgctttcaaggaacgcaggttgaagccttaaaggatattcacttcaccgtggaaaagggtgagtacgtggctatcatgggggaatcaggatccgggaaatccaccctcctcaatatcctagccatgctggatcagccgacggaagggcgggtctacctcaatggcaccgatacctcaaccatcaaaaacaaggacgcctccagcttccgccgggaaaaactaggctttgtctttcaagatttcaacctgctcgacaccttatctgtcaaggacaatatcctcctgcccttggtcctttcccgcagaccaatcaaggaaatgatgagtaaggtcgatagcgtgagtcgggagttgggcattcaccagctcttagaaaaatacccttacgaaatctctggtggacaaaaacaacgggtagccgtagcacgggccatcatcacctcacctgaaatccttcttgcggatgagccaacaggggcgctggattccaagtcttcggcagctttgctagatgtctttgaagatatcaataccatggggcaaaccattctcatggtgacccactcaaccgcagcagcagctcgggccaagcgcgtgctctttatcaaggacgggattctttacaaccagatctttcgtggggaaaagacagagcgtcagatgttccaagaaatctcagatactctgacggtcatggcgggaaaggaggatcctgatgtttaaattaacaagtaaattagcactttccaacctcaaacaaaatcgcaagttgtattatcctttcgctatagctgtcattttaacgaccatgatcctttatagttttatcgccttgtcattgacccctcatttagaggattcttacggagggggatcggcgagaactgttcttggttttggcagtttcgtcgtccagctggtcgtcatcattttggtggcttatgccaatggctacgtcatgaaaaatcgttccaaagaactgggactctacagtgttctgggaatggagaagaagcatctcctcatcatgaccttatgggaattgctcttcttctatgttctcacagttggagtaggactgggtttgggactcttgtttgatcgcttgattttcgccttgcttctaaaatgtatgggtttaccagtcgtcattcaatcaaccttccagatagaggctgttcttaacactttacttgggttagccttagcttttggcctcattctcttgttgaattctttccgcctcttgcgctacagttccctccaccttatgcagcaaaagaaagcaggagagaagaagggacgcttcttgctggttcaaactctgttaggacttgggctcttaggaattgcgttttatatagcgctaaccgttgagcggccagttgcggctgtccaaggattctttattgccgtcatcttggtcattctagcgacttatctcttattcaacgcaggctctattaccttcttaagatttctcaaaggtcggaaatcctactattacaagccagagaattttatatctgtctccaacttaatagctcggatgcgaaaaaatgcagcgggccttgcgaccattagtattctatccaccatggtcttggtcaccttaaccgggtcgctcaatatctttattggagggcagaattacctagatacggtttacccttctgattacatgattagtgtggggcatatgccttcagatgctgaaacagaatcggttattgaggatgttcaagctcaaattaagaaaacagccgatgcgacacatctatcagattatcaggtggcacagactacatactggtcggctgaaattcgaaagattgatggaaggagcttagaggtgaatgaccagtccactccatcaactggtcaggagttgaagtcagaaggaacagtctacttttttgatcaggcgacttatgagcaactgaccggtcaaaaagttgagcttggggaaaatgaaatcctagcctatgggtatcaatatcctggaaaattagacgcacaattagaaatcaatgggaagaccttcacgattaaagaaaaactaaactccaattttatccaagggaaactccctcaatccgacctgtttcaacaccaaatgggcttgtacctggtcctccctgacttgaaccaactgggactaaaagttgataaaaatttggaattctctattactgctaaaaataaagataaccaagattttatttctggcttgatcaaagagctgtattcgacagacaaaatcagtcaatatggtgcgacttattttggtggatttgatcgatacagtatagagaaagattggcgtgaaacagcagggactcttctatttatcgggatttttctatcggcgatctttctattagctacagttctcgtgatttactacaagcagatttcagagggtcatgaggatcgagataattttgtgatcttgcaacaagtaggattggaccaaaagcaaaccggcaccaccattcgcaaacagatactcactgtcttttttcttccattattcttctccttcctgtacctaggagtagcctacaagatgatcgcaaaaatcgttgctatcttaggagcaaccaatgcgggcttggtgcttcaaacaactctttctatctgcgctgtcttcttcatctcctatgtccttgtctttcttctgacttctagaagttatcggaagattgtcgtgaggtagcgttcgagtctataaaagattagaaataagatgaaacatacaacattttgttagcacaaaaaacaccgaggatcaaatccccggtgttttctatcacgattatttcacgtgttttgcaagttcttcttgcgcttttttgtttgattcttctttttctttcaaccaattcttataagctttttcgtaatcagcagttgtaactgtcttatcttgaactttttggtatttgaagaagcttgattcacctttaataccaattgcagaatttgctgctgagaatggcgttaccttcgtgatagatggaactccacccttagagtagattggaagtaccattgcgttttcagtcaaccaagcttgggcagcagcgtatttttcataacgcgcattggtatccaatttttcagcattagcagcatccaacaattctttgtattggttcaaaccaattttttcgatgagagcttggtctttcttaggatcaagtcccataccagtcaaggttgaaccatctgttgggttcaagatatccaagtaagtagatggatcttggaagtcaggtccccaacctgtgatatccatatcaaagtctttttgatctggtgattgggcgaagtaagtagcgttgtctgcatcgtctgtagacaatttttgtacatcgatcacgacattgtctttaccaagagctgtttcaatagaactcttcatagagtctgcttgttggacaagagcattagaagattggtctacgacatagtcgatatggattgggaattgaacaccttgtgattgcaattcagatttcgctttttcaagttccgctttggctttatccgcattatgcaagctatcttgcgcgtcagcaaagctaacacctttccactcatctcctgttgcggcaagtttttcttcaacgagcgtaccgaagtcttttccgttggcttgcacaaatgttggtggaactagaagggtacgtagagtttttgatgctccgtctttcccgttaacttgagcgctgtaggaagttctgtctaaagcaaagttcaaggcttgacggaaattcttgttttgaagagctgtcttagtactgttcttttgctcatcagacgtcttcttcgtatgaccgtagttttgacggttaacgttgaagtaagcgtagtaaacagtagaatcttgaggtgtataaacgatgttatccttgaatttcttctcaattgtgctgtaagttgagcttgttgggaagagacgagcagtagataggttcccatctgagaagttacgagcaagatagtcttggtcagatccatcgaagtaagtcaatttaaccgtatcgatgtgaacatttttcttgtcgtagtaatcagggtttttatccaactcgatttgtgattttgaagtgaaggatttcaaaatgtatggaccattgtagaggataccatttggtttcacgctaccaaagtctttcccagctgattccaagaatttttcattaactggcatcatggtagcagtcgtcaatttagaattccagaaagattctggttggttcaaagtgtattgaagagtgtgatcatcaacagcttttaccccaacagttgagaagtctttggttttcccgtttacatagtcatccaagcctttgaccgagttttgaaccaagtaaagagcatccgattttttatctgctacgtattttagagatgtcacgaaatcttgtgcagtgacgtcagcgtattcatttccttctgaatcataccacttcgcatcttttcgaagcttgtaagtataagtcagaccgtcttttgaaacggaccagtcctcagcaagagcaggcactaagttaccgtattgatcgttttcaaacaaaccatcgaccaagttggttgtaatgtcgcttgtagttgaacgatttgaagtcaaatagttcaaggaatcagggtctgtaccatacacgtagttgtaagtagtcccttttgacgcattagaagatgagccacatgcagcaaggaaaagcgttgaagccgcggcgacacctgctaaaagagcaagcttcgattttttcatattcgtgtctccttttgaataattttaattattatactccaatcaatctacaaaataaagtgttttttgaactttttttgtatatttacacaccactatacagtaaaacccttgattttaagggatttttaaggaataaaaatttttttaaaaaattactattatgctttacatactagtaaagaaagagtatactgatagtgagcaaactagtatgtaaaacaaactagtgaaaaatgtgaagaaagaggtgagaaggatgaaagagtcccaattactaaagggagtcttggagggctgtgtgctggagattatttccaaaaaggctatctatggctatgaattgatccaaagtctcaaagagatgggatttgataagattgtcgctgggaccatttatcccctgcttcaaaaattagaaaaacaaggggtcattcatggggaaatgaggccgtctccagatggtcctgatcgcaagtatttttcactcagtgatgctggaagagagcgcttagaggaattttgggaccagtggcaggagctagtcacaaaagtagaacgtatcaagaaggagggagaagaatggtagaaagttataccgaaaaaatgtcagatgaattgattcatctaaacaaagaggatcaagcctatgtgaaaaaaatggtggcctatattggggccaaatcctatttttatgatgatgaagcactcggtgaacaactctacaatatggtttgcgacctgaaagttgctgaaaaagaaggcattcgggcggtggattattttggaaaggatccacgggcgatggtggatcaagttctttcagacttgcctaaacgctctttaggatcttatgtgggactcgtcttcctacttggagtgatcttggttggcatgcgttatttaatggattttacctggatgacgccactaaaaatcgaacccttgacctatgttgtcattctcctcaatttcttggtgttcagccagttcatcacgtggctttggtctaaacagagctatggtgaaatgaagtggtcttgggctatgtttatcagtgtgatcagcctgatggtatttctgaacatcgtacgacaattttcgatctattttggccacattgggagtctcttcttatcagatggttgggcaattgttctcgctgtcctagtcttacttgggtttacggtcatggcttttagaagcaggaatcgtctgatgtcgagtctactagtcatgggcctgactttcctagttacaggatgctggattcgtcttgtgaatcaggaaactgctcatttaataggctggttacttcctctcatgggactagtcctgacccttattgtattttgtctccaaagaaagaaggaagaagcatgaaatcagcaatgtattttgaagaaacgcaggccttgatgcaaacctttagccaggaggaccaagcctatttccaagatctctgggattatttcaattttgcaggtttcttatatgaggagaaagccttaagagagcaggtctataatctagcgctagatttttcgcaagcaggagcggatggcttaacggccaaggactattttggtctcgatccaaagggaatggcagaccaaatcatcgaaaatatgcccaaagaatcgacgcggtctgttttgaaatatggggctatcttttcaggtattgtgatattttatcgcctcttaagtgattttgcttctcaagcggtccttgtgctcaagccactagtctatttgacagacatcattttgggactcctagctgttgggatcatcttctatctccttcgtcgtctcatttttgcggaggaaaaaacgaaaaaagcaatttatgtagcatttgttctagttctaggattctattttgtcggtgaaatagtgggagtccgcttcttgccagctcttgcttggtttgtagtccctagtccttgggatactcttctcatgacaggggctagcggggctctcattctttggcaatggaaagaagagtttggacgagctttcatctttcctatcgtcgcctttttagtggttggattcttacatcgctggaccttggcacaaggagttcagaatcttggtatgacggttcttctgcccacagtgatcatcgtctttgggttggttatttattattggtttacgattcgtgctttgaaaaagaataggacggaaagtgataaatagtaagaaaagggggggctgggacaaaagtcctagcctctcaattatttttggattgtcgagcaagacgcagtggttgagtgctcaaagcactgctttgaggtggtagataggacttgctaagcaagtttcctaagtagttgttcgcttttcaagttccaaagatgccctactcaactgtgcggaggtgggacgacgaaatcgaattctaacaaattaccgatttctgtctcactctctttcttatccaagtatgatagaataaactcattagatgggagaatatacatgaatctatttcgaaaaaaggcttggggacaggttcacccagggttaaaccgctatttacggttgtgggatttgattattttaggaatcggtgccatggtggggacagggatcttcacgattacggggactgcagcggcgaatttagctggtccagccttgatcatttcaattgtgattgcggctttttgcgtcggcttatctgccctcttctttgcagaatttgcatcccgcattccttcaactggtggagcctatagctacctctatgccatctttggagagtttccagcctggattgcaggttggttgaccgtgatggaattcatgacagccgtatcaggtgtggcctcaggttgggctgcttatttcaagggattgttggccaatcttggctggcgtctgccgacggctttaaatgggacttttgatccagctgcgggaacttatgtggatctcttacctattttggtcatggtcctcgtcacagccttggtccttatgaatgcaaaagccgtcttacgcttcaattccttgctggtcttactcaagttctcagctcttaccttgtttattcttgtcgggatttttcacctaaaccctggcaactggggaaactttgccccttatggctttggcgaaatttatggtggtcaaacagggattatggctggcgcttcgctcatgttctttgcctttcttggttttgagtccatttcaatggcggtcgatgaaatcaaggaaccacaaaagaacgttcctcgcggcattgtccttagtcttttgatcacaacggttctttatatcttggttaccctggttttgaccggcatggttccttttaagaacttaaatgtagaggatgcggttgcctttgccctccgtcaggtaggagctagctgggcagggaattatgtatcgttggtcgctattttgaccctgattaccgtctgcatttctatgacttttgccctctcacggatgatttacagtttggcgcgagatggccttttgccaaaagcgatgaaacagctcgatcctaaaaccagaatcccaaaaaatgcgaccctggtcgctggagtaatggctgccattgctggtggagtttttccgctagctagtatcgcttcctttttaaatatctgtaccttggcttacctggttatgttggcctttgccctcttgaaattgcgcaaggaacacggtgctcctggacctggtgaatttaaaacgcctttggttccggtcttgccaattctatcgattgtggtctgtgtgtcctttatgacccagtattctctatcgacctggctggcctttggagttgctctcttgattgggataggaatttattttggctatgggtatcgccattcagaagaacataaataaaagatgaaagctagagtagaagaactctggctttttgtatagggaaagctctttttttggtataataaagggagaaagttaaatagataacaaaggagaacaccatgacatttgaagagattttaaataatagtaatcataaatttctttaatgaattccacatagagttctggtttcttaaaattatattttatagagttcgtctacatttcttattgtttcactctagaataattggtagagggttataatagaattatattttcgaaaagtcgaagtagttataaatatttataaaagtataagaaagtaaaagataagattgaaaaatgaataggaggttattatgagattcattatttcttttatcacattttgtggtttagttggtgtttggtattttataaaaaaacaacctaatataaaatatcgaaacatttcggctttgatctctttaattagttttgttatatttggtttattctttcgagaagataaatctcaacaaggttcggtcagatctgttgttagttcaagcagttcgtctttgaatttatctacaacaactcaggcatcttcctcgatattagaagtgagttcatcaagcgaatcagcttcgatatcaaatcaatttaatgatgaagagtttcaaaaatatgctagtcaatttcagaataaattgaatgagttggtaaaagaaactgggcaagtttatagtgctacagggagaggtcttatactatatctgactgttccacaagactttaaatataattcaaaagataatattcaagaatttgctgataaagtgttgcaggtcaagaatgaaacttttcctgtttggcttgttgaaaatggctattctgcacaagatgtaagtattcgtctacacattaagacagaagatggaacggtactcgcaaaagaaaagttatcgggaataatgaaagttacgaagtaaaaaatcaaattaagcaaacctacctcaaaaatgttggctgatctgtctattaaaaatgaaataagtcatcttattaatttgctaaaaaataaatacatattttggttcttctagttttgatagaagaaaaattaaaatgttagtttttgttagtatgtgttatttttcgaagaaaaccgaaaattttatctaggttttcacaatatgtgatatagtttttttgaaactatttttatatagactttgaactaattaattcttgacattggagtacgtggaatttacttggaaaataaaaaaacgctgattttacgacgtttttaacctatttagaatttacttggaaaataaaaattatggaagataaagatttaaaaaagttattagaattattgaataaaaatgaagatgaaattattgaatacaaagttaataataaagatcatgatcgtataggcaaatatatatcagctttagctaactcagcagcaatgttaggtcagcaattctcatacttaatttggggggttaatgatgtttcaaaagaaattattggtacaaaattctatccaaaaactgaaaaacatgcacagggtgagccgtttattacttggttagaaaggatgcttgatcctcgtatcacaattcgttttgaagaatatgatatcgaacaaaaacatgttgtcgttttagtcatccacatgaatgctggtagacctgttgcttttagcggtagtcgatacattagaagtggatcttcattaaaaaacttaaaggattatcctgaaaaggaaagagaactgtggaaatcctttgaatcgcgatcatttgaaagagagtatgcaaaaaccgcatgtacatttgaagaaattaaagaattgattgatgttaattcctatttgaaaatgatgggatactttgaagattcaaacgatgaagagataatttttcatatgatagaagatggtgtgatagaatcttctggaaaaactttcaatctaaccaatatgggagcatttacattcgcaaaaaatcttaaaaattttgaaaatttatctgctcatgctttacgagtaattagatatgccggtaataataaactaagtgcagtagctgataatacagctagtaaaggagctgccgttggttttgaaggtttactaaaatttatcaatggtcatttacctcgtaatcctgaaacgttaaaagataatggacaaatcacttctgatacagattatcctcctctggttatacgtgaaatagttgcaaaccaaatagtacatcaggatttttctgtaaaaggtagctcaccaacaattgaaatatttgataatagagtagtattcacaaatcctggatctcctcttaatcgtcctgaaagattgcttgatatgcctccttactctcgaaatgaagctttagctgaactatttcgaaagatgcatttagtagagtctcgtggtagcggtatagataagattatcttaacgttggaattaaatcacttacctgctccggatatagctgctaaggataattatactgttgttactttacatcaacgacgaacaatccaagaaatggggaatagagaaaaaataaatgctatttattatcattctgcattactctacatagaagataattttatgacaaatagtacactaagaaaaagattcggattgacaaataaacaatcatctatcgcttctaaactcattgctcttgcgttagaaaatgacaaaataaaaatttatgacgaaaacgctggaaaaaagaatatgcagtatattccatactggggcattagttacaataataactctactccaatttcctcaaaataaacgctaataagggatttcacaagttcaaacatgatttgaaccacaatttaaaacctttttaataatagtttacctaatgatgttttttgaaaggaatataaaaatttcagaagtaaaaaaagatggcagtacagtatattgtgctagtatgtatttagaaatagattagataactggaaaaaggtgaaaactagtataactgcccaaactagaaaagaacaaaattaaatgataaaacctagcaaaaaaatttaaatataaattcagttacattactgagttagtgtagatataacattattaggaaccagctgatttatggctagatacatttaaattaactgtaaaaccatagaccttaaaatataacgaaatcacaattgtataacatttagttcttattataaaagagccatgaatgctctttaggttcacaaaaaggtgaacaaaatacaatgaatatgttttacgagttcataaagttcatcatatcaatattaaattacatcaaaggagaacaccatgacatttgaagagattttaccaggattaaaggccaagaaaaaatatgtacgaacaggatggggtggaggagaaaactatgtccaattgtttgataccatcgagcaaaatggagtggctctggaagtgacaccttatttcctcattaacgtgtctggtgaaggcgaaggcttttccatgtggagtccaactccctgtgatgttctagcgacagattgggtggaagtccatgactaaacgggtcttgattacaggcgtgagctccgggattggtctggcgcaagctcgtttgtttttagaaaagggctaccaggtctatggggtggatcagggagctgatccccagttgccaggtgagtttcacttcttacagctagacttaaccttggatttgacgccgatttttgactggtgtcctgaggtagatgtcttgtgcaatacagctggagtattggacgattataaaccgcttctggagcaaagcgctcaggagattcaggagatttttgagattaactatgtgactccggtggagctgacacggcattatctgactcaaatgttggagaagaagcgaggtatcatcatcaatatgtgctccattgcatctattctagctggtggaggcggtcacgcttatacttcctccaagcatgctctagcgggctttaccaagcagttggccctggattatgcagaatctggcattcaagtctttgggatcgctccaggtgctgtcaagactggcatgactgctgcggactttgaacccggtggcttagcagactgggtagccagtgaaacacctatcaaacgctggattgagccagaagaagtggcagaagtcagtttctttttggccagtgggaaggtatctgccatgcaagggcaaatcctgacgattgatggtggttggagtttgaaataggaggatgaaaaagcaagagttgaaatcttgctaagaaatgtaatttttttttcttactgaaagaggatcaaacctaggtgaacaattaagttaggacagtggagagacaggtatttacctctatgctaaagaagatcttactgaacgaaattaaacctaccagagtgatcaggatgaatcagatttctttatgattggtcacgatggagatctagcctatttcaccaaaaaaagacagggataataacaattatgaagataactgagggtaagttcagaagaactttttgaatgggctctacctgaaaccttaagagattgttttagaagaaacgaatagtacaattgatttgctaagttattgtggaatgaaggtgaagtcatgattaaattagtgaatgttactaaatgttttagtgatggatcgaatgtcagatatattttcaaaaattgtaattttgaatttaaaaaaggtagcacgactgcaatagttggccgttctggattaggaaaaactactcttgttaaagtaatattagggattaccagtttaaatgagggggatatcttagtctgtggtagttccattttagatatgaaaaatttgagtaaggtaaggcgtaggaatattggctgtgtcttccaaaactttaatttgatttcaggtttcacggtgaaagagaatattctacttccaagatatttttttgaaaatggagagaataacattaacgaaatttgtaacactttaggtctttcaaaggaaatgttaagcaagagtattgataagattagtggaggtgaaaaacaaagagttgctttggcaagagctcttattaataatccagaaatattgatagcagatgaacctactggtaatttagacgctgctaacgaacaaaatataatagaattgttgaagcggatcaatgaggagttaggtatcacgattataacagtaactcatagtgataaggtggcgaatagtatgcagtctatttgcacagttgttgatggcaaaattgagtacgtaaggagatgataaaatgaatcattccatattattcattgctaaaagagatttagaagttaacaaacgaagatatagattagttcgactgtcaatagcgatctctgttttgctaattgttttagtgatgctcatttctaattctttctataataaaatgattaaagaaatgactgtagcaaataaaaatgttgttactgttgcctttggtaataaagaaaattctctaaattataaagctttgcctttattttctaatgaagatattgatcgagtaaaaaaaatagatgaagtaaaaaatattactggtataaaactattatttacggatgatatcaaattccaaaatggtaagacatcggtttccaatactatccattgtctagaagaaaagtatttaaaaaacctgaatattagaattgctgaagggaaatttccagagaaggacgatgaaatattaatcggagattccgtacacaaggctacatcaatgaatgtcggagatacggtgactattaagattgataatcattatgtaaagtttgtaatttcgggcattatagacaagcaagacgcgcagttattttctaccttgccaacagaaataaatcaaatgatggcaatcaatgtaaaaagtagtagcgtttcatcaaataaattttattatctgaatgctactgtgaaaaatggaaccgatttaaatgaagtagcaaacaagatagaaaagactgttttaaaaaatgaaaatttaaaacaatctttatcaggaacaggattagatgttgttgtagcaacacaacaggatgttatcaatatgctatccagatggttttcctacatcgacctttttatcctcttaatcatagttcttatctctattgtagcgattattaatatcatcaatattctagctattaccattcaggagaatcataaacagatcgcaacttttaaaatcatcggtgcatctgatcgacagataaaaagaatatatttatttgaaagctttatgatgggagtacgaggtacaagcgcgggattgttgataggaattgctatttcttatttgatcatctttttgagtggattaccactagatattgaacttagcagattgttgttcccggtattaatagggatactcacttcagtttttgcaggattattggtatctagaaaaattactaaaattgatattgaaaaggtattaaatcaatagagaagaaatgattagggtcaataagagatggtgttgcaaaaagaatagctatactggtttcactatcgactgagctttgaatgaaagtaggaggatttgatggaaatcaaaaatcactttggcgtctacggagtctgtcttcaagaagggaaactgctctgcattgaaaaaactagaggaccttatcagcatcgctttgatctaccgggtggtagccaggaactaggggagggactgacagaaaccctcaagagagaagttcttgaagagacaggctatacgattagcagatacgctaatcctaggatgtatgacgtgatggttcaagaagaagggaaagacttcgctgtgcatcatatcatggccttttatgatatcgtagtcgatttcgaaggccctcaacaatcccttcctcaggaggttcttgatgggactaatgattcagcaaatgcagtttggttgaatgtggaagacattactgaagacaatggttctcctttagtattaaaggtaaaggcagagttaggaggatttccagaattggacatgacaagctatagaaattggaaggtgaaagaaaagaaggagaacaaatgacacctcaagaaatgtggaatgcctacaagcaaatcaacccctctatcggagatgagatagatgcctgggcttttggagtggacccagaccttttagcggaactggtctttaaaggcgaaaaaacagcaactgcctcagcttacgatctttacgcagtagaggacgaaccccttccccaagaaggaacctttgatgttgttttagacagtaaggatcaagctgtctgcattattgaaattacaaaggtttctgttcagcctttccatcaggtttcagccgaccatgcctttaaggaaggtgagggagacaaatctttagcctattggcgtcaggttcatgaggagtttttcacggagtggctggaggaagcaggtctgacgtttacacctggcagcaaggtggttttagaagaatttcgcaaggtttatccattatagaacacttttttcttttagaaaatcagaaaagagaataactgttttctattaaaaaatagctagtgattgtgtcaagctaaaaatactgcccagttcttagaactattaaaagattttttgagactttccgctgtgagaaaagtgcttgaaacctaaagtttcaagcgctcgggagttttgaaactttaggttcaaaactaaatcatggaacttcctggattgctgaaatcatccactggataatttcacctaatgtccgtactcacctaaggaaagtctcaacgaagatatgatcttaatctaactctccttctaggagagttttttgatctgggccttattttccaaaagggctaaaaaatggtataatgtaagcgatattgtacagaaaagagaaatgttatgccaaattatgccattattttagcagcggggaaaggtacccgtatgaaatcagatctgcctaaggttcttcacaaggttgctgggatctctatgttggagcatgtcttccgtagtgttggagccatctcacctgagaagactgttacagtggtcggccacaaggcggaattggtggagcaagtattagctggacaaacagaatttgttaagcaaacggagcagttaggaactggtcatgcggttatgatggcggagccagtcttggaaggtcttgaaggccatacccttgtcattgcaggggatactcctttgattacgggtgaaagcctcaaacacttgattgacttccatatcaatcacaagaatgtggcaacaattttgacagccgaagcagccaatccatttggctatggtcggattgttcgtaatgacaatgcggaagtgcttcgaattgttgagcaaaaggatgcgacagattttgaaaagcaaatcaaggaaatcaatacaggaacttatgtctttgataatgcacgcctctttgaagctttgaaaaatatcaataccaacaatgcccaaggtgaatactatatcacggatgtcatcggtattttccgtgaggctggtgaaaaagttggggcttatacgctcaaagattttgatgaaagtctcggggttaacgaccgcgtggccctctcaacagcagaaggcatcatgcgtcgtcgcattaaccaagcccacatggtcaatggtgtgagctttgtcaatccagatgcggcctatatcgatgtcgatgttgagatcgcaccagaagtgcaaatcgaagccaatgttaccctaaaaggccacacaaaagttggggctgagacagtcttaaccaatggaacctatattgtggatagtgaaattggggcaggtgccgttattaccaactcaatgattgaagagagcacggtagctgatggcgtaacggtaggaccatatgctcatattcgcccaggttctagcctcgccaaagatgtccatattggaaactttgtcgaagtcaaaggttcgtctattggcgaaaataccaaagcaggtcatttgacctacatcggcaactgtgaagtcggcagcaacgttaattttggtgcaggaaccatcacagtgaattatgatggccaacacaagtttaaaacgacgattggaaacaatgtctttgtcggatccaattcgacgattattgcgccagttgaattaggcgacaattccttagtcggtgctggatcaaccattaccaaggatgtaccagctgatgcgattgcgattggtcgtggccgtcaagtgaataaagaagagtatgcccttcgcttgccacaccatcctaaaaataaataggagattctcatgcaatttgaagaaaaaaccattgagcgcaaggagatttatcagggaccgattttccaagtggtcactgatcaagtagaactacccgctggaaaaggccaagcgcagcgtgatttaatcttccataacggagcagtagcggttttgccgatcacagaagatgggaaaacgatcttggtcaagcagtaccgcaaggcgattgaaaggacttcggtggagattccagcagggaagttagaaaagggagaaaatgcagaccctaaagcggctgctctgcgcgaattggaagaagaaattggctacacagcggatctagagttgttgtatgatttttattcagccattggattttgtaatgagcggatcaaactttatggtgcgaccaacttgaaaaaggtggaaaatccacgtccacaagatgcggatgagaccttagagttattagaagtgaccttgaaggaagcgaaagatttgatccaaactggcgaaatctgtgatgccaagaccatcatggcgatccaatattgggacttaatcaataaatagaggaggatccgatgggaaaacctttattaaccgatgaaatgattgaacgagcaaggcgaggtgaggacatcaccggtcctaatatggtcgatgctgaagagacgaaaattattcgaacagaccacaggggatttggctatgaacgtcctatgagagagagtcgtatggagcgtccacaagagcgttattctcaggatacggtgcagatccaagtggagcccacagtgaccaagagtcgtcgcattgaagaacgcaaacaaagtgtggtccaatccaaactcaataagattttgttctggatcattgtgctcctcattgttttaattattgctatttggcgtctataaggtcgttacaaggagagaaatgacatgaaaattggaattatcgcagccatgccccaggagttgaagatcttggttgaagcccttgaaaatggggaaaagcatctgcgtcttggaaaagtctactatacaggatcaattggacgtcatgaggtcgttttggtggaaagtggtatcggaaaagtcatgtctgctatgagtgtagcagtcttggccaatgatttcaaagtggaagccattatcaacacgggttctgcaggtgccgttgccccaggaatggctgttggggatattgtccttgccgacaaactggcctatcatgatgtggatgtgacagcctttggctacaagtatggtcaaatggcaggtcaaccgctctactttgaatccagtcgctattttgtatcagaaatgaaaaaagttctggaagaagaagctgcaaccacgcatgtgggcttgattacaacaggagatagctttatcgcgagtgaagaaaaagtcgcagcaattcgggagcatttcccagaagtattagcagttgagatggaaggggcagccattgcccaagccgctcatgcagctggacgtccctttatggttattcgagctatgagtgatacggcagatcactcagccaatctctcttttgatgaatttatcgtagaggctggcgaacgctctgctcaaaccctgattaccttcttgaagagattggtgtagaaaaaatatagggagatggaccatgtatcgtgaatcgtattttgatggaggcctattttcatatattggccatgttttattagcaaccttcattacagtattgacttttgggatttgtgctccttggggcgtgtgcattatgtataactggaaggtcaagcataccgtgattgatggtcgtcgtcagtactttgacggcacggctatgcagttatttggaaattggatcaaatggtggttctttaccatcattacatttgggatctatgtgttctggttaaatatcaaggtcactcaatggattaccaagcatactcattttatagactaattgaaaaggactcgtctacggactagtccttttttgaagccgaatctttcagaaatagggaactttcatgctataataaagactagtaatgtaaaggagagaatatggttttatcaaagaaacgggcacgtcatgtgattgaagaaattatcgccctcttcccagatgctaagccaagtctggattttcgtaatcattttgaattgttagtagcggttatgctctcagctcagacgacagacgcggctgttaacaaagcgacaccaggtttgtttgcggcttttccaaccccgcaagccatggcagcagccagtgaatccgatatcgccaagcatatttctaaattaggcctctatcgaaataaggccaaatttctaaaaaaatgtgcccaacaattgctggataactttgatgggcaagtacctcagactcgtgaagagttagaaagtctagcaggagtaggacgcaagactgcaaatgtggtcatgagtgtaggatttggcattccagcttttgctgtcgatacccatgtggagcgaatctgcaagcaccatgatatcgtcaagaaatcagcaacaccattggaagttgaaaagcgggtcatggatgttctgccaaagagcgaatggctggctgcccatcaagccatgatttactttggacgggctatctgccatcctaaaaatcctgaatgtgaccagtacccacaactctatcattttgattaggaatcagttcctctgctcgaaagagcagaggttcttttttaggctaaacgtatatttattaaaaggattgaaagattcggttttgcaaatctgtggtggtaggtgcctagactcgcctatccggcttctttgagatcgatttcaagatgctttttctttatatcttattatattcattcagaaataacgaacttttttaaaataaatttggttttttgtaagaaatagtgtataatggtagaaaatctaacataaggagatagtgatgaaagcaaaaaaactgttagctcttgcaggagtttctgttgcaggtgcctttctcttagcagcatgtggcggtggtagtagcaatcaagcaacctactcattcgtctattcagcggatccaaataccttggattacatcgctgcaactcgtacaacgacttcagatgtcacaagtaaccttgtagatggtcttcttgaaaacgaccgatacggaaactttgtgccaagtctagcagaagattggactgtctctgaagatggattaacctatacttacaaacttcgtaaggatgccaaatggtatacgagtgaaggagaagaatatggtgctgtaacggctcaagactttgttacagggatcaaacacgcggttgagtctaaatcagaaggtctcttcttgattcaaaattcgatcaaaggtttggatgcctacgtaaaaggggaaaccaaagactttaacacagttggagtcaaagccttagacgaccacaccatccaatatactttggttcgtccagaaagcttctggaactcaaaaacaacctcaggtgttcttttcccagtcaatgcggatttcttgaaatctcaagggaaagattttggttcgttgaaacctagcagcatcttatacaatggtccattctacttgaaatcattgacttcaaaatctgagattgaattggtcaagaacaaagactattacgatgcgaaaaatgttcatatcgatcatgtcaaattgacctttaacgatggatcaaacccagattctatcattaaaaactttgaaaaaggtcaatattcctttgcatctgttatgccaaacagttcgacgtataagagcgttaagaaaaactttggcgacaacattgtctacggtttgcaattaggaacatcctactatcttggattcaacttggaccgtcaaaagtatgaccacactgccaaaacaacggatgaacaaaaagcttctaccaagaaagcaatcttgaacaaggacttccgtcaagcggtgaactttggctttgaccgcaaatcatatgcggcacaggtatctggatctgatgcggctgaaaatacccttcgtagcaccttggtaccaccaacttatgtccaagtcaatggagaagattttggtaaggtcgttgaaaaacaattggttacctatggggatcaatggaagggtgtgagcctggccgatggtcaaactagcctttacaacccagaaaaagccaaagcttcatttgcgaaagccaaagctgaattgcaaaaacaaggcgttcaattcccaattcatttggactacattgtcagccaagtggacaacagcatggtccaacaagctagctccttcaaacaatctgtagagtcagcgcttggtgcagacaatgtcgttgtagaccttcaaaaggtttcggatgatgatttccaaaatatcacctacttcagcgatactgctgctgcgagagattacgatatctcaggcggtggttgggctcctgactaccaagacccatcgacttacctcgaaagtatcagcccagtaaatggttctgtcttctactatcttggtattgatgcaggttcaaacaatccagccattgcaacagttggtttggatcaatacgctaacatgttgaaagacgccgatgctgaattgttggatcaagctaaacgctatgaaaaatatgcagcagcgcaagcttggttgacagatagctcgattacgcttccaactgtctcaaatggtggtgctccaatgcttcaacggaccgtgccatacagccgtgctgcttcatgggtaggtactaaaggaacaggaacattctacaaataccttgaaatgtctaaagatgttgtcacaacaaaagactttaacaaggccaaagaagaatggttgaagaaaaaagcagaatccaataaaaaagctcaagaagatctcaaagatcacattgagaagaaaaaataaaaaaatcaatcattggtctatcaatgaggataaaaaaagtcgaggctgggacaaaagtcctagcctctcaattgtttctggattgtcgagcaagacgcagtggttgagtggtctctactacgctgatttcatcagcttttacagccctactcaactgtgcggaggtgggacgctccagtcttctatcaactatttgaaagctggaaatctaggggatgtcctaaccatcaggggggaatgtgtccatcaaggtcgtacaacctgtgtcgtcgatgtagatatcaccaaccaagatggccgaaatgtctgcaaggcaaccttcaccatgtttgtcacaggccaacgatctgaagatagacaggtgaggatataaaagaaagaatgagtagatagttacatcccaaaaatcccgagtgtgatcactatccgcaactctataactttaaagacatttgaaaagcgaggtctgatgacttcgcttttatttgatagggaagaaagtaagtaagagccaagaaaacaacagagcaatagcgccaattccaaggctaaatagaacaggaaggataatattttggtaaggagccttgcccctttcctcggcttcttcaatctcgctcaggctgcgtccttgatcataggcgacaatctggcgaaaggtacgaagattatgatgtttcttaaatttctcaatgcgtagggcgtagaacattgtgatagcataaatcaagcaactaatagcgataccgaaccattccagataaagtattagaggaatcattattataggacttccaattagtaaaatggtaaaaaccactccatctttttgatagctcataaattcttggtcgtgaataatttgtttcatggtttctaaatctcctttgactagtttgtccaatgacacttcaaagaccttgctcagtaaaagcaggttttgaatatcagggtaggttgctccgcgttcccagttggaaatggattgacggctgacaaagatgatttcagccaaatcatcttgagataaatttttctctttacgatagtgctggatctgctttccgacttgcataagatttcctcgctttctgatttcattctacctaattatacaaaaaatggctatcaaagttctttgacatgctgatttcatgggctttagcaaaggtttctgtcactggatttacaggtctgtcaatttatatttacttactgaaaaagaggccaacaacctcctttttcttattcactaaatcttaaaaaatagccatctggatctaaaactgcaaattcatgaggatagatataatggtcgccaacacgaaattctcttttggtcaaaggacgatgaatgggatagtcagcttccagcagtttttggtggagctgaggaacatcctcaatgccaaaggaaatattgacaccacgcccgaaaggataagtcagctgagctaattcttctgcgtcgccttcttctaacatgagttggcagtcttcaagggagaggaagagaaatttttcctcggggcgttcgtattcgacagagaagcccagcaagtcgcagtagaagtagcgcgacttttcgatgttggataccacaaattcggggatgacagcttgatagtccattagctttctccttagagttcaatctccaagacaatcggtgtgtggtcttggcgtgggcctgattcgatcatatctgacttggtaaccttatctgctacacggttacttgtgagccagtagtcgattctccagccggtgttgttgatttttgaagtcttgctgcgttgtgcccaccaggtatagcgctctggtacatccccgtgaaggtgacggaaggtgtctgtaaatcctttggccaaaaggtttgtaaatccttcacgttcttcgtctgtgaatcctggtgaacggcggttgctggctgggttggcaaggtcaatttccttgtgggcaacgttgtagtccccagttgcaaggacggttttttctttgtctaattcagccaaatattcagcatacttaacgtcccaaatttgacgttcttccaaacgtttgagtccatcaccagcgttaggtgtgtagacctgagtcacgaaaaattcatcaaattccaaagtaatgatccgaccttccaagtccatggtcgaaggagctccgatttctgggaaagtcacaactggtgtgagctcttttttatagaggaacatggttccagcgtagcctttacgagccggttcttgagaagagcgccaggtgttttcgtagccagggaagagctcctcaaggatttcgaggtgttttttagtaggacctttggcggataacttggtttcttgaatggcaatgatatctgcatcctcagaaaccaaggtttggaggacttcttgagagagtttggcgcgtgctgaatcactagttaatgcagcattaagcgagtcgatattccatgaaatgagtttcattgtatttccttttcttgacatgatagataattttattataacaaaaaatatatttttttctgattagaatgccttgaattctcccctgaaatacattataatagcttgaattcatttggagaaagggagttcattatgaaattttactcttatgactatgtattgagtcagatcagtcagcaaaactgggtgaccattggaatatctggcttgcttgttcttctgactggtttttttgcggtgaaagcctatcgggagaagcacgatagcaaattccgtgaattatccattatctcgattttgactctggttgcagtggtcttgatcggcatcagcagtttccaaaatagccaaagtaataatgaccaatttcaacgttctctgcattttattgaggtcatctcaaaggagttggatgtcaaaaaagaagacgtctatgtcaatacttcagcagccacagatggggcgatcctgaaggttggagaggtttattaccgagctatcgcaggatctgacccagatagctacctattagaaaagatggatctgtataaaacagacgtggaacttgtggaggtgaacaaatgatagtaaattttttaaacatcttgattaaattagctttgggcttgatttccttggtatttgtcatcaatgtgaccgggaaaggaaacttagcaccaaattctgcagtagaccagatacagaactttgttcttgggggcattattggtggggtcatctacaatagctccattaccattcttcaatacattgtgattctcttaatgtggactattttgatcttgctcttaaaatggctcaataccaatgttcgttttatgaagcacttgattgatggaaaaccaactgtcatcattaaaaatgggaaactggatccggaagcgtgtcgttccaaaggactttctgcttcagatgttgccttgaaactacgtggacaagggatttttcaattaaaagatgtgaagcgcgctgttattgaacaaaatggtcaattaattgttgtccgtgcgggggatgaaaatcctaaatacccgattattacggatggagtgattcaacttgaaattttggaaacaattgggaaaagcgaagagtggttgctggctgaattggaaaaagaaggctatgacaacgttctggatattttcattgccgagtatgataaaggaaagatcaatgttgtgacctattaagaagaagagattgggcgatcctgtccaatcttttttctttgtaaaatttcaggaaagacctcttcattttcttgagatactcttgaaaaaatagtaaaatgaaaggaaagtgtttattagaaaagaaggatagaaaatttcatgaagaaaaaaatacggaagtttgagaatcattcgattacacgcagactctacctgctgtttagtttgatttgccttctttttttggttctgattacccgacttggctatatgcagatctctcaccaagcctactatacggataaattggcaaaagctaccaaaaagacggtcaaacaagggagtgtgcgagggcaaatttatgatgcttctggtaagcccttggtggaaaatgtgggaaaacaagtcttgacctttactcgggatcgtaaaatgacggcccaagaaatgcgagagacagctggaaaactcttgcagtatgtcgatgtagaaaatcctcaagtaaccgaacggcaagaagtggattactatctagccaataccaaagtataccaagaggtcgtagagcacctgcctgagaaaaagaaatttgataccgatggcaatcgtctaccagaagctaaaatctatcaagcagcagcggacagcattgacccttcaaaactcggttacacggatgatgagaaaaagattatctatctttatagccagatgaatgctgtggagaattttgcgacggggattatttcgacgcaagcactaggagctgagcagattgcgaccatcgcggctgacagtcaggaccttcctggaattgcgatcacgaccagctgggaccgcaaggttttggatactcctttagcttctatcatcggaacggtttcgactgagcaggcaggacttccagcagaagaagtcgaggactatgtcaaaaaaggttatgccctcaatgaccgggttggaacctcttatctcgaaaaggaatacgaaaacgtccttcaaggaaaacgcagtgaaaaagaaattctcctggataaaaatggcaatatggataaagtggtagacatttcaaaaggagctaagggggaaaacctcaagctctcgattgacttggatttccaaaaaggggtggaagatattctccgctctgcctttagcgcagagttgcaagctggaaatgcgacctactccgaaggtgtctatgctgtagcccttgagcctgatacagggaaagtccttgccatggcagggatcaaacaccaggctggtagtcaagatttatcaaccgatgctttgggaacagtcaccaatgttttcgtcccaggatcggtcgttaaaggagcaaccttgacttcaggatgggaaaatggtgccatttccggcaatcaagtactgaccgatcagcccattgtttttgcaggatcaacgccgattaactcttggtttacccaatatggcagtcgctccatcaatgcagtagaagctttggaatattcttccaatacctacatggttcaaattgctcttaagatgatggggcaaccctacactccaaatatgaccttacaagtagatcaagtggaccctgctatgaaaaaactccgttctacttttgcagagtacggtcttggaacgtcaacggggattgaccttcccaatgaatcgaccggttttatcccgaaagagtatacagtcggtaattatttgaccaatgcctttggccagtttgacaactacacccctatgcaattggctcagtatgcggcaaccgttgcaaatgatgggaagcgggtgagtcctcatgtcgtcgaaggcatctatgacaataatgatcaaggtggcctcggtcagttgaaaaaagcgatcgaagccaaggagctcaatcaagtccatatctcagcggagaacatggctttgatcaagcaagggttttaccaagtggccaatggtacgagtgggttgacgacaggaaaaaccgttggtcgtggggccagtgtgcccatcagtgcaaagactggtacagctgaaaccactgtcgatgggggcaaacaagccattaatactaatgtggtggcgtatgcaccatcgaataatccaaagattgcggtagcggtggtctttccacataataccaatctacaggcgacagttagtcattccattacgcgtgacattattaacttatacaatcagaaacaccccatgaattagaaaggaaactatgctttatccagcacctattgcaaaattaattgacagctattccaagttgccaggaattgggatcaaaacagcgacccgtcttgctttttacactattggcatgtcagatgatgatgttaatgaatttgccaagaacttactaaatgccaagcgtgagctagggtattgcagtatttgtggcaatttaaccgatgaagaaacctgcgagatttgtcgagatgaaacgcgggatccttccctcattcttgttgtagaagatagccgggatgtctctgctatggaaaatatccaggaataccacggccgctaccatgtcttgcatggcttgatctcacccatgaatggcgtgggacccgatgatatcaatctcaagagtttgctcagccgcttgatggatggaacagttactgaggtcattgttgcgaccaatgcgacggcagacggggaagcgacatctatgtatatctcacgcgtcctcaaacctgcaggcatcaaagtgacccgtttggcacggggtctagcagttggagccgatatcgagtatgcggacgaagtgacccttcttcgcgcgatcgaaaatcggacagaattataagagaagttctttcgaaagggctgtcattgtggtatactatcaagtaagaaatcaagggaacaattagggagaaactatgagtaaacaagacttaatcctgttatatggtggacgtagtgcagaacgtgaagtatctgttctttcagcagaaagcgtgatgcgcgcgattgattaccaagcattttcggttcagacctattttattacgcagtcaggagacttcatccagacgcaagcttttgaagagaaaccagcggatgatgagaaattgatgaccaatgagacagtggactggtctaaaaaagtcgcaccatcagcgatttacaaggaaggagcagtggtctttccagtgcttcatggaccaatgggtgaagatggttctattcaaggcttcttagaagtcttgaaaatgccttatgtcggctgtggcatcctggcttctagtgtcgcaatggacaagatcaccaccaagcgggttttggaatctgcagggattccacaagttccatatgtagctgtagtagaaggcgatgatatagatgagaaaattgctgcaattgaagcgactctctcttatccagtctttaccaaaccatccaatatgggatctagtgttgggatttcaaaatctgaaaaccaaactgaacttcggactgctcttgaattggccttcaagtacgatagccgtgtcttggtagaacaaggggtcaatgcgcgtgagatcgaagttgggctccttggaaactatgatgtgaaaagtaccttgccaggtgaagttgtcaaagatgttgccttctatgattatgatgccaaatacatcgataacaaaattaccatggcgattccagctcaattggaccctgaggttgtgaaaatcatgcgaaccaacgcagaaaaagcctttcgtgcgatcggtggtctaggcttagctcgttgtgatttcttctatactgataaaggagagatcttcttaaatgagctcaataccatgccaggctttacccaatggtctatgtatcccttgctttgggacaatatgggtctcaactatacagatttgatcaccaagttagtagagcttggaaaagaagttttccaaaaacacgaagcgcatttgttgtaagaaaagagagagtgggacagaaatcggtaattcgttagaattcgatttcgtggtcccacctccgcacagttgagtaggcctgtaaaagctgatgaaatcagcgtagtagagcccactcaaccactgcgtcttgctcgacaatccaaaaataattgagaggctaggacttctgtcccagccactttttttgtggtctagaatatggtataatgagaagaatttgaaacgagcgtctagacttttggggacgacgctacggagaactgaggagtcggatatgaatctcacattacatgaagttgctcatctagtacatgcaaaaaatgatatcagccaatttgaagatgtggcccttgtcaaacctgaatttgacagccgtttgattgggccgggagacctttttgttccgttaaagggagcgcgtgatggtcatgatttcatcgagaccgcttttgaaaatggagccgtagccactttttcagagaaagtgattgaaggccacccttatattttggtggaagatgttttgagcgcatttcaaacattggctgcagcctatcttcaaaagacaaaagtggatgtttttgctgtgacagggtcaaatggtaaaaccaccacaaaagatatgttggcacagcttttgtccaccacctacctgacctataaaacacaaggaaactataataacgaaattggtcttccttatacggttttgcatatgccagaagggacggacaaactggtccttgaaatggggcaagaccatctaggagatatccatctcttgtcagaactggcgcatccaaaagctgctattgtcaccttgattggggaagcccatttggaattcttcaaagatcgaagtgagatcgcaaaaggaaaactccagattgcggatgggatgccagaaggcggtcttctggtagttccagctgatccgatcgtcaatgcctacctccctgaaaaacaaaaagtggtccgctttggtccagacgaggagatttttattaccgagttagtcgagcgaaaggacagcctaaccttccgagcgaatttcttagaagaagcgattgatcttccggtaacaggaaaatacaatgcgaccaatgctatgatcgcagcttatgttgccctgcaagaaggagtgagtgaggctgcgattcgtgatagttttgaaaccttgcaattaacacgcaaccggacagaatggaagaaagcaggtaatggggcggatatcctatccgatgtctacaatgctaacccaacggctatgcgcctaatcttagaaactttctcgactattcctgctaatccaaatggtcgaaaattagccgtcctggcagatatgaaagaactaggggagcaatctattgatctgcacaaccaaatgattctcagcctctcgccagatgttttggatacggttattttttatggccaagacattgcgggattggctcagttagcgagtcagatgttcccactcggacatgtctattatttcaagaagacagctgaggaagatcagtttgaggacatggtcaaacaagtcaaggaaagcttgaaagagcaagaccaaatccttatcaagggaagcaattctatgaatctagccaaattagtagaggaattggagaatggtaagtaataatgtactgaaggacattcagcgcttgatttcaatcaccaatacaggcttagccttctcaaaagatccatttgatcaagagcgctaccaggatattcgtgctattttacaggatcttgtgagagaaacgactgatctgaattcacaagaattatcggatttgtttcgaccgacaaactattatgacacccccttaattgatgttaggacttggattgtcaaagatagaaaactttgtctggtgaaaggtcagggagaagagacctgggctttgccaggtggttttggtgaggttggctattctcctaaagaaaatattttaaaggaaatccaagaagaaacgggctatgtagcacgtgtcaatcggttgttggcagtatttgataccaatcgctaccaattgcaaagtcgccaatatgtgaaattggtatttgaatgtgaattgctggatggaagttttcaacagaatcaggaaatttccgatcttgcattttttgagagagagaaaatgcctgctctttctaccaagcgcaatacagaagaacaattgaatttcctttgggaggtttatgatgggaaacgagatttgtattgtgattaaaaacgatctataaattaaagggatataaaaatgacactttgggatttattgtttacgaaccaaaaatcagccccgcctgagtttgggctatggtatttcattctgccagcttctttgttggtggttggctacttttccatcaaatatgcgcagtcaaaaagctaccaacgcttttggtattgggcacaattgattcaagtcttaaccatcaatgcttggtatattctagcccacatgcctttgacagacaatttacctttttatcattgtcgcttggctatgcttgcgatcctctttgctcctagagggacctatatcaagcaatattttgccttgttgggtgttctaggatccattgcggctttggtttatccggcctttgaccccttcccattcccccatattactgtactcaatctgatttttagtcactgggccttgtttgccaatagtttgatttacctacaggatttttatcagtcggaaaaacaggacactttacgaattgttaagatcacctttggtatgaatgcagtcatctttttggtcaatcttttgaccagaggagattacggcttcttacgacgtccaccaatcattggagaccacggtgctcttttgaactacctcttggtcagcatcgtgatggtggctggtatttgcttggtcaaccagcgctacaaatacaagatggttgaagagactgtcgtttcgcgttcggaatagaaaaaagagtagatgagggaaagaaatcatggcactttgggacttatttttcactagtcaaccaacatcccctcctcaattgggtgtctggtatttcttattgccgacttctttggtagtggtgggagttctgtccgttcgatttgctcactctaaaggctatcaaaacttttggtattgggggcaattgattcagttgctcattatcaactcttggtatctagcagctcgcttgcctttttcagagagtcttcccttctatcatagccggatggccatgtggattatccttttggcccccaagggaagcttcaagcaatattttgccttagtcggagtctttggctccattatggccttggttcatcctgttttttatccctacccttttcctcacgtttcctcgatcaacaatgtctttggtcactgggccctcttggccaactgtttgatctatcttgttcaatcctaccaggtggaagagggggctgtttggaaaatctgtcagatgacgtttggggtcaatgccattattcagcttgcgaatctcgcaacgggcggaaactacggctttatgcgtcgcccacctgtgatcggtgaccatggccttgtgttcaactatttgatcgtgacagttctcatgacggggacactgattttcatcaatacgatcgttcagtacagtaagaaaagaagaatacctaaatctgtttaaataaggagattttatgcatcattttttcactacagaatcaacagcaccaccagcaatctcagcactttggtatagtgtgatggtcttgttcgttgtgacagcgattatgatgtcacttcgctattatcagaatgagcaatttcgtaaatgctttcaatacttacaaggcttccagttaatttgcttgtatctttggtattttgcctaccacattccttggtccaatagcttaccattttatcattgccgcttggccatgtttgcggtcttgtttttaccagaccgctggaaaagtaaacagttctttgccttgatgggagtgagtggagccatctttgccttgggctatccagtctttgatccctatactttccctcatattacaagtttttctttcctcctcggacattactgtctcctcatcaattccttgatttatctcttgagatggtatgatcgaaacctcttaaaaaatagtcagattgttctctatacctttgccttagatttattcctggttggagtcaatcaattgacgggaggaaattacggcttgatggcccgccctccgattatgagaggggataaggtgtggctcaattatctggttgtatccagtattttagcccttgctttattactctttaatcagttcttccgtcgcagaagtgagcgggtgaaagtgagaaaataacaagtaggaaggttgggacatctcggtctcaaccctgttttatattaaaggagaatatatgaagcgtttcttgctaatgatttccctcatttggagtttagtttgtacaatcacgatcgcacatgcagatgatgaagttcgctattcaattgaatcctatgtaggacacctccaattgcaggaagacagccaagcaacatttacacaagagattacctatcagtttcagacaggctatcatggtcaatatgtgactctaggaagcgcaaatcctcttccaaaagggtttaaaattcatcgtcatcctgaggtggaagcctatgtggatggggaaaaacgtgagattcgtgtagaggagacagacctggaagatggtcggcaattaaaaatatacaatgcccgtatcgtcggagggacggtcaagatcaaagtaaaatggaagattgatcatctcttgactttctacaaggatattgcagaactgaattggtttcctatttcagatggagatgagaaagtcgcgaaattagatttttatgtggatggcttgaatgccaagcagggaaaactgtatgcccatactggttactttaatccaccagcccaagtcgaacggactgcaactggttatcatatttggacaaaggattttccaaaaaatggcaagctcgaactgcatgcctattggccaatgacagaggtcctgcgtcgagaccaagcaaatgagattaaccagggaaatggaaaagagaaatttctcaataaagaaaaatccattgaacaaaaaacattcttttatcggacccttctactcaaggtcgttccaattgtatcggttcttttatttatcctagctttcattccatggattcggtattttattagtaccagaactcgtcggattgcaaaaggagtacgattatacgaaccaccacagaatttacctcctcttgtcctagctaaggcactgtatcaacttgattttgaacggatggtgatgtctagagagaaggggcaactaaaatttaatcatctcatccaggcaaccgtgttagatcttattgatcgaggaaatcttcggttgactagggatgaaaatggggaaaccttgacctgtctccattatgaaggcttggctgattttgaattaaagtttattgaaatgatttttgatcaagaatctgaaatcaatatcagtgaggtattctcaaagtataaaattgataaagtagccctaaaaaaagactttcgagctgctaaatcagacacgcaacgagaccgtattcgaaagatcggaaatgaagttcaatcccttttaaaaaaggatgcccagcaattgtcaaaaggtgtcgataaggagattgcgaaattaggattgccttcttattttagagacttatctgagaaagaagaagctctttcaaaaacaggctgtgccttacatttttggctcttactgatcttatttgtgagcatgtgtttcttatcttttggattcggttcacacctatcttccttctatttttggatgattgtattgttggtcgtcttcttcattccattttatattcttgtgaaaattcgcgaagatcatctacaatccttagagaacttggattcacaattccaatggatggcctttcgaaatatgatcgaaagtattccaaatttcaaccaagcagaacttgagagtgtcatcctatggaatcgtatcttagtctatgcaaccatgtatggtcaagctaaaaaagtgagtcaggtactcaaaaatcatcagatttccttaccatatgagaattgggatgctgttgtttggataacgacctcttcaaattccttcctagacggctctaccttgatgagttatgcagatgattcctatagcgtttcaagcttctctactaactcctcagatggcagtggcggttttgacggcggtggcttttctgatggtggcggtggcggaggatttggagccttctaacagtcatgataagaggactagaatctacggattttagtctttctttttgctctcaaagaagaatcatcgttgaaaaaagtgcctattttcgctataataggacagatagagaaattgaggagaaatccgatgtagagatgaatttgtaaatttatcaaaaaataagaagagaaagaattaggaacatgaacgtacaagaagaaattaaaaaacgccgtacctttgccatcatctcccacccggatgctggtaaaacgacgattactgagcagttgctctactttggtggggagattcgggaagccggtactgtcaaagggaagaaaacaggaaactttgctaaatccgactggatggatatcgagaaacaacgtgggatttcggtaacctcatctgtcatgcagtttgactacgatggaaaacgcgttaatatccttgataccccagggcacgaggacttctcagaagatacttaccggaccttgatggcggtggatgcggcggttatggtcgtagactctgctaaagggatcgaggctcaaaccaagaaattgtttgaggttgtgaaacaccgtggcattccagtctttacctttatgaacaagctggaccgtgatggacgtgagccattggacctcttgcaagaattggaagaagtcttgggcatcgcaagttacccaatgaactggccgatcgggatggggaaagcctttgaggggctttacgacctctataatcaacgcttggaactctacaaaggggatgaacgttttgccagtctagaagatggagacaagctctttgccaacaatccattctacgagcaggtgaaagacgatatcgaacttttgcaagaagctggaaatgaattctcagaagaagccatccttgcgggtgaattaactccagttttctttggttcggctcttactaactttggggtgcagactttcttggaaaccttcctcaagtttgctccagaaccacacggccacaagaagaccgatggagaaatggtcgatccttatgacaaggatttctcaggctttgtctttaaaatccaagccaacatggaccctcgtcaccgtgaccggattgcctttgtgcggatcgtatcgggtgaatttgagcgtgggatgagtgtcaacctgcctcgtactggtaagggcgctaagctatcaaatgtcacccagtttatggccgaaagccgtgagaatgtcagcaatgccgtagcaggagacatcatcggggtctacgatacagggacttatcaggttggggatacgctgacagttggtaaaaacaagttcgaatttgaaccactgccaacctttacccctgaaattttcatgaaggtgtctgccaagaacgttatgaagcaaaaatccttccacaaagggattgagcaattggtgcaagaaggagctatccagctctataccaactaccaaacaggtgaatacatgttaggtgcggttgggcaactccagtttgaagtctttaagcaccggatggaaaatgaatacaatgccgaagtggtcatgagcccaatgggtaaaaagaccgttcgctggatcaaaccagaagacttggatgagcgcatgtcttcaagccgaaatatcttggctaaggaccgctttgaccagccagtcttcctctttgaaaatgactttgccctccgctggtttgcggacaagtatccagacgttgagttggaagaaaagatgggataaggaacgttttcaaaaccgatccataacaatagaaataagaaaacggaagcttatccgttttcgcttttaaaggagaaatgatgggattattaagtggtttgatgggcaatgcctctcaaaaaaatgttgacaaagtagaaagagatctggaagatattttggtgccgggagagcaagtcactctcgcttttagcctgattcgtgatttgatcgtctttaccgaatttcgtttgatcttggtggataagcaaggagtaacaggaaagaagacatcctacaaatcccttccttatcgctcgatctctcgattttcagtcgaaacttccggtcattttgatttggatgccgaattaaaaatctgggtctcttctgcagtcgagccttcagaagttttacaattcaagagtgacagcagcgtcattgaaatccagcaagcattagccagtgcagtttttaaataaaaatatcattttgatagagaacagttgagaaaggagacggaatgtttatcgaaaaacaattgggtcaagatcggaaatggatcaatatcgactcggatatgattgctgaaaactcatatctttataaaaaatacgagattgacaaagaaaccattgagtacgcgatggataagaacgaacgtgcccatatggattataatcgagaaaacggtacgatcacatttatctacaatgtattggatttagaaaaggacaaggaatactacgaaaccatccctatgacctttatcgttcaagatacgcgactcgtgaccatcagtaaccaggacaatgcctatatcattgaacaaatggttcgctatttggaaagccatggggagttgtcgatctataagttgctttttgcaggtcttgaaatgatcagtaatgcttattatccgattattgatcgcttagataagcacaaggatgaactcaatcgtttgcttcgaaagacaacgacgaccaagaatctttatgccctgtctgaccttgagaccggtatggtctatctggtcgcagcagccaagcaaaatcggatgttgctagaacatattaaagcgcatgccatttatcgcaggatgaatgatgttgaaaaagagcagtttgatgatgccatgatcgaagcgcgtcagttggcttcgatgactgagttgatttccaatgtcttgcaacagttgtcaggatcttacaacaatatcctaaacaacaacttgaatgacaacttgacaaccctaaccatctttgaagccttgttggcggttttagccgttatcaccggtttcttcggaatgaatatccctcttcctatgacaaaggatcccaatgcttggatttatgtatccgtatgtagctttatattatggctcattttgggaaaggttatgcggtggattgtgaaacaaagataaaaaagaggcttggagaaatccgagcctcttcgtatctagaataatctgagaaataggaaccatctagacacctgccctcctctccaaagaaggggcagtgtgaatagttcatcgactgtacaaaatcttcttggaaatagtaggagtagatttaatagtactgagtggttctaaataaatcagaacttagaataaatcgttgaatcagataaaatgatcctatttctttatacagaaatattttagatactaactgtattatacatatttatttgtaaaaacgcaagaactaccaaaaaaagtttttccgaagtttttatactcctatgatgaagtatatgaaatggttacaagaagaaaaccagtcctggcaaggtttaggggcgtttttataatcttaagctatctaagattttttcctaaaaaataaaattagtctcctgtgactatcatttacctcttcattgtgttatactagataagttgcaaacttgtatgagagaaatgctggggagatggaacaattagaaaaggaatgttggtcaatctcccacaaggaggatcttggtgtcttttcgtttggaaaacgactttaatcaaccatatccgctagtgcgaaaacatttttcgcagaagggaattccataaaaaaacgattgggtttttctttagatgagtcttgcgacaggtaaccgggaaggagacttcctatgcaatcagtgcgttttcgcattgaaagaagtgtgataaagtggcttcgcaccactttttagaaagaagaaagaattgaaattcaacgaatttaacttatctgctgaattattagcagaaatcgaaaaagctggctttgtagaagcaagccccatccaagaacaaaccattcctttggcccttgaaggaatagatgtcattggtcaggcacaaacagggaccggtaaaacggctgcttttggtcttccaactttggagaagattgatgttgataacacagtaatccaagcccttgttattgccccgacacgtgagttggcggttcaaagtcaggaagaactcttccgttttggacgcagcaagggtgtcaaagtccgctctgtctatggtggatcaagcatcgaaaagcaaatcaaagccttgaagtcaggtgctcatatcgttgtgggaacccctggacgcttgctagatttgatcaagcgcaaggccttgaaactcgatcatattgaaaccttgatcttggatgaagcagatgaaatgctcaatatgggctttttggaagatatcgaagctatcattagccgtgttccagaaacacgtcaaactttgctcttttcagcaacgatgccagaagcgatcaaacgcattggtgttcagtttatgaaagaacccgaacacgttaagatcgcagccaaagaattgaccaccgacttggtcgatcaatactatattcgtgtcaaagagggcgaaaagtttgataccatgactcgattgatggatgtcgagcaaccggagcttgccattgtctttggtcggactaaacgccgggtcgatgaattgacgcgtggcttgaagatccgtggtttccgagcagaagggattcacggagatttggatcaaaacaaacgtcttcgtgtccttcgtgactttaaaaatgggaacttggacgtcttggtggcaacggacgttgcggcacgtggtttggacatttcaggtgtgacccatgtctacaactacgatattccacaagatccagaaagctatgttcaccggatcggacggacaggtcgtgctgggaaaacaggccaatccattacctttgtatcgccaaatgaaatgggctatttgcaaatcatagagaacttgactaaaaagcggatgaagggaatgaaacctgcaacagcagcagaagccttccaagcgaaaaaacaagtagcgctgaagaaaattgagcgagactttgaggatgaaaaaatccggactaactttgagaagtttggtaaggatgctcgcaaattggctgcagaattcactcctgaagaactggctatgtatatcttaagcttgaccgttcaagatccagatagtcttccagaagttgaaattgcgcgtgaaaaaccattgccatttaaaccatccggtggtggctttggtgggaaaggcaaagggggccgtggaaatggccgtcgtggagaccaacgccgtgaccgaaatcgcagagatgaccgtgaaggtggacgccgtgatttcaaacgcaagtccaataaaaatagccgagactttgaaggtaaaggcaacaaacgtcctcatcgtacttctaatgaaaagaaaaatggatttgtcatccgcaacaaaggggataaataagtcctaaagacggtctagcaataggccgtctttttaatgaaaatcaaaaatacaagggttaactagctgttaacccttgtatatttataaggagacctaaatgataactgactcttttagaaaaatgtatcatgataaggagcatcctaaaaaagtcagaaaacagaaagaacggattcctaaaacggaatgtttctgttaacatattaagtttacaattatttctaagctttgtcaaggtttttttcttatatttttaaaaatttttaacgaaaaagataaaaattgacaatcttagctaaaaggttataatgaatataataactatattaatcataaagaggtggcgtccatggtgattgcattaaaaaacgatgatctagaagtacaatgtaagacatttggaggggaattgagctccattcgtaataaagaaggcttagaatatctctggcaaggggatccggagtattggtcgggacaagcgcctgttttgtttccaatttgcggaagcgttcgtaatggccaagtacagtatcatctaaaagatggagtgaagacaggtcagctgccaagacacggtctcattaggaagagagagtttgaacttaaagaacaaacagaccatcgtcttgtctttgaaatcacctctaacgaagagagcctgcaaaattatccctaccattttcgagttgaaatcgtttatgaactacaagggaaagaaatcaccatcacctatcgtgtacaaaatctagagtctgatcaagtcatgccttatttcattggagggcatccagcttttcattgtccccttttagcagatgaagactatgaagactacgagttgatttttgaaaaagaagaaacctgcagcgtccctctcttgttcacagaaactggattggtcgatcgcctgcagcggacgccatttttcgatcataagcgtagcctacctttgcgacatgaactatttgaaaaagatgccattattttagatcagttaacctctaaatctgtgaagcttatctcgaaaaaatcaggtaaaggtttggaatttgattttgcagattttgaaaatctggtcctttggtctaccaataacaagggccccttcattgccttagagccttggacaggtatttccacatctgcagaagagggcgatttcttcgaagacaaaaaaggtgtgatccagttggaccctcaagagacacggagtcatcagtaccgtatcaccattttgtaaatgaaaaaccgttggactatggagtccgacggttctttttgatatagtttagttttgcctggcgcgatttctttttaaagagagcttcggcagacatcgcagagggtttatctggataggattctttgtaaagaagtttaacggggaggcgagcccgtgtgtatttggccccttttccagcattgtgagtcttcaggcgtttttcgacatccgtggtatagccagtgtagagagagccatccgcacactctaaaacatacatgtaagccttagtttccatagtagatctcatgaatctcgtctgtatagctgccatcttcattgtgaataaagagaggaggaagaatttttaaaccatccagtgagccatccttgatcgcctcaatcaataacatattcgcctctttggtcacttttggatagacaaactggatccgcttaggtgcaagattgtaacgcttcatggtttcgatgatatctaaaaagcgatctggacgatggaccatcgctaagcgaccatttgatttgagaacctgctgggccacatggcaaatctcatctaaattggtggtaatttcatgtcgggctaagaggtagtgttcactctcattgagattggaatgctcatccaccttgaaataaggaggattgcagaggataatatccaccttactgcccttgatatgttgaggcaaatgcttgaggtcatcggtgatcatggacatttgctggttcaagctattgagggcaatcgagcgggtagccatatctgctaaacgttcctgaatttcgacaccaatgatctgagcctctgttcgggtacttgcaaatagtcccacagctccatttccagcgcagagatccacgatcaatcctcgcttgggcaattttggaaaacgtgagagcaggacgctatccacggagtaactaaaaacttcccgattttgtatgatttttacatcacttgaaaagagttggttgacgcgctcgccgtcttttaattcgatatctgtcatggctctattatagcatgaaaagaggctcggggaaagatgataatttttgatatattaaaataatattttttgtaaaaacgctttcttttcttatttaaatatgttactatatattaaaaaagtgggaggttttgtaaatgaacaaaacgaaaaaatggttaggtttaggtttatccgtactttcagttagtgtactcgtagcttgtggaagctcaaattctcagtcaaataattcttcaaaagaaactaagacagagaaaatcgcaacaactgaaaaaagtagtgagaaaaaatcagcatatgctattggtgataaaattgtctttgataaacaagctgagtatacaattacaaaagttgaatggtctgatgaacgcaatgattttgaccaatcaaatcctgataaagtgttgaaagtaacttataatgttaaaaatctttccgataaggatttagctgtaggtgttgatatcaatctttttgtaggcggaaataaaatggaatcttatcctaatacgaatacaatggggtccatttcgccaggtcgatcaatggaaggtgcggtacaacattttggtgtaaaaggggatggcaaattagaacttgaaataaaaccatttactgcatttaatgaaaaacctgcgattgttgcttttgatgcaccgtaaaaaaagaggctgggacaaaagtcctagcctctcaattgtctttggattgtcgagaaagacgcagtggttgagtgggctctactacgctgatttcatcagcttttacagccctactaaactgtgcggaggtggggcgacgaaatcgaattctaacgaattaccgatttctgtcccactctcttttttaatcaaattcatatttttgtagaatcgttgtgaggataaagactcctgtaaagatggccatcaatgccagataaactgggaaagtagtggctgtaaggagtgaaatctcgatcaagtttttcaatacgaccgcagatgcgtagaatcctacaacagagaagagaatgaggagggctcgccagatatttagtggaaggcaggcacggatgacggataggaaaccgatggatccaagtaagtaataggatacagtagacatatcggctgcagaccaaccatggcttgctccccaaaggcgaatgaacaagacactaaagacgaccatcaaggcgcttggtaaggctaacagaagggaacgtcttaagaagtgtttttcaaccggtttgatattgcgttcaaaggtcaacacaaatggtgggaatccttcgacgaattggtcaatcaaggtgatttgaatagggatgaatggaaaaaccagcaaataattgacattgaagaaaagggcactggcgatacagataatagccaagaggaaggaatagatcgttttgatgaagaaaatcggagcgattcgtccaatgttattgaccacacgacgaccttcgaatagaatttctggaacatcattaaagtcagagttcaaaagaacgatattggcaatttgacgggttgcaggatctccttcagccattacgatggagcagtctgcttcacgaagagcgaggatatcattgaccccgtctccagtcatagctgtcgttcgaccagctgctttcaaggtttgaatgagcagtttcttttggtgaggggatacgcgtccaaagatggctgtttcctctgcttgatccactaattgatcatcagaaattttggaacaatcgatgtagttttcgtagtttttgaagcccgcttgttgagcgatataagagaccgtcacagggttgtcaccagagatgatcttaagatccacgccttcagagcgaagatactcgagggtatcagaagccccttcacgaatggggtctgtaatctcaataaccgcaattccttcaagattttcaggcagtttcaattcctgcatgctgatctgttctgaactgtgggctaagacgagaacgcgcgatccacggccttgtgcttcgacgacagcagttggattttcttgaaggagcatttcaggagcaccgagaaagacggtgccaagattggagaggtgcatggctccccatttccgatcacttgagaaaggaatgatgttttccgcagtataagcatgctccaactctccataagccttgcgaatagcttgagcagtaggattggtgtcctcgctatattgcatgtaagctgaaaggataactttgatggtttcctcagaaaaatgatcagataagctatggagagcttcaactgtcatcttcccttgagtgatggtaccggtcttatcaagacacaaggtatccacacgcgccagggtttctactgagtacatttcttggacaagaaccttgcgcataccgagcttaataaccgctgtcaaaagagacgtaactgtcagtaaggcaattccttttggcaacattcccaggagagctgtggaagaattcacgacagaatccttgattggcagcatcttgatcaacaatgcttcaaagaagagggcaaggccaaatgggatgataattttaccagtgaagctagaaattttcgctaagttataaagaatacgcgaattgataggcttcaaggttttagcttccatcatcagtttgttggcatagttgtttgctccaactcgcttgacacgggcatagacttgaccactggcaatataactaccagaaagcagttcatcgccaacttcttttaagaccagatcactctcaccagtcagcatagcctcattggcttcagcgataccagacatgacttcggcatcactagggatctgctcacctgaagacaagagcattaaatcacctagaacaagcttttctggtggaatcgcatctttttccccgtcacgaatgacagtcactagctcacgactcatgaggttgagcttatcaatcatccgcttggcgcgcatctcggtcatgatccctgtaatggcattgaagcaaatgactgcgaaaaagatcatattgctccaggcctgtacagcagccaaggccacagcaatcacaaagtttaaggtattaaacaaggtgaagacgttgcgcttgataatttgccaggtactggtacttgtattcgttgtaaaatcattggtttgtccgcgatccattttcttgcggacttcactgagggacaagccctttaaatcaatagtttccatagacaatatgatatcatttttttgagaaaaagactatctagaatcggtccgctgagacattttttatctaaaaaaggtttgcggtcaaaatcaggatacggtataataagaaagaaccttttacaggatggaatatcttgtagagagacgaatgaaatggatttgaggaacaactatgttttatacctatttacgtggccttgttgcctttattctttgggttttaaatgggaatgcccattaccatcataaggataatattccagatcaagaagagaactacatcttggtatcccctcaccggacttggtgggatccggtctatatggcctttgcgaccaagccaaagcagtttatctttatggcgaaaaaagagctcttcaccaatcgtatttttggctggtggattcgcatgtgtggggcttttccgatcgaccgtgaaaatccaggagcagaagccattaagtatcctgtcaatatgctgaaaaagagcaaccgttctttgattatgttcccaagtggaagccgtcattctcaagacgtcaaaggcggtgttgccatcattgccaaaatggcgaaggtccgtatcatgccagtgacttatactggtccaagagacttgaaagggttggcaacaggtgaacgcattgatatgaactttggacatcccattgatatctcggatattaaaaagatgaatgacgaaggagtggcagaggttgcttgccgtatccaagaggagtttgatcgcttggatgcggaagcacaagcaatcaacaccccaacaaaaccttttatcttgattcgtttgttaaaaatccttttgattccccttgtcttagtcgtgggcatcttgaccttgctctttagttacctagcaagctttgtatgggatccagacaaacatcggaaaaataagtaaaaaagctgagagtttttctcagtttttttttatttttacgaataataaaagtgagaggaggtttcttatggaggatatcatcgaaaaaatcaaagaatataagctctttttagctcttactgctatcggactcttacttggagggtattttctttttcatcgacctcagtcaagtgcatccaccataccggatctttatcagtcttctagttcaacttcgagcaaagaaaaggtgcagaccgctagttccaaagaagaaaagacggcgacttctgtgtctgatgcacctgagatcattacggtcgatgtcaaaggagccgtcaaacaaccaggtgtctatgagttgcgctctgatagcagagtccacgatgccattcataaggcgggtggaatgactgctgaagccaatagccaatcggtcaatttggcgcaaaaactctctgatgaagcagtgatttatgttgccaaagaaggggaggatgttccagcacttggaagttcagaaagtcctgcaacttcgtcagcatcagcagaaaaaacaggcaaggtccatttaaatcgagcgaccgagtcagagctccagacggtatcaggcattggtcagaaacgagcccaggacattatcgcctatcgcgacgcaaatggcccttttcgatcagtggatgatcttaaaaatgtttcaggaatcggggagaaaacactggagaaactaagagatgctttcacggtggattaaagagctccctttttcgcttgtacacctcgcttttttacttctttggttgtattttagtgtttatcaaccatcttggctttcgatcagcggtctagtagtggtgatatgtttagtggttcatcactataaggaggatcgctcaagtttgttgcgtcttgctttagcaactctttgttttgcgaccttctttgtttttcagagagcccaggatcatccaaaacaagtcgaaagtcgctccccagcccatttacatctgatcccagataccatcaaggttaatggagatgccctgtcttttcgtgctaaagatcagggtagtacctaccaagttttttacaccttgaaatctgagaaagaaaaacagcagtggcaaggtcaaactcacttgttggagttgacgtataagggtgtcatagaagagccagaagggcagcgaaattttagaggttttgactatcgagcttatttgaagactcagggaatatatcaccaaattagaattgaaacgatccaatctgcgcttcccatccaaacgtggaatgttttcgattggctatctcaatggaggcgccaagccattgtttggagcaaggagcactttccacagccaatgaaccagtatatgaccggccttctttttggttatttagatacggatttcgaggagatggatcagctttacacgagtttaggaattattcatttgtttgccttgtctgggatgcaggtcggctttttcatcaatgggatccgaaaagctctcttacgtctaggaatcttgcaagaaacagtcgatatctggatgcttccaatctctttgatctatgctggcttgacaggtttttctgtttcagtcgttcgcagtctcttacaaaaaatcctctctcaaaagggcatccgagggatggaaaatatggcgatgaccttgatgctcttaatgattctcatgcctaagtttctcctgacagctggaggcgtcttgagttgtgcctatgcctttattttgaccttggtagatactaattcttattcaggaattaaaaaggtgctagtggaaagtttctggattagtctggggatcttgccgcttttgacctattattttagtgtctttcaaccatggtcactcccattaaccttcctattttctttcttgtttgatcttgttctccttccagggttaacagtgctgtttatcttatcgattctaaagccgcttacgatttttaatagtttctttctactcatagaggagtgtattcgttggatctcaaagctcacgtcgctaccgttggtatttggtcaaccgacgggattagctctgatcgtcctcttacttcttttagggaccttatatgatcttcgaaagcaaaagaaccttcgttttctgttcatcggtatgattctagtcatcttttgttggaccaagcatcctttagaaaatgagatcaccatggtggatatcggtcaaggagacagtatctttttacgcgattggaaaggaaggaccattttgattgatgtcggaggacgcgtcacttttaaaagtggagacaagtggcaagagcgcagtcaatctgccaatgcggataaaaccttgattccctatctcaagagtcgaggtgttggaaaactcgatgctttggtcttgacccatacagatcaggaccatatgggcgatatgctagaggttgccagacaaatcccggttaaaaaagtgtatgtcagtccaggcagtctaactagttccaaatttcaagagaaattgaaacagcttcatagtccagttaaagtagtccagagaggggatcaacttcctatttttgatcatcatctcgaagtcctatctcctgatgaagtgggggatggcaaaaataatgattcgattgtcctctatgggcagttttatcagaaacggtttttgtttacaggtgatctggaagaagctggggagaaaaaactattgggaaactatccccaattacaagtggatgtcttgaaagtaggccaccacggatcgaaaggttcctctagtgatgtatttttggatcagctacatcctcaattggccttaatctccgttggaaagaaaaatcgctaccagcatcctcataaagaattgcttgatcgtttagaggaacgatccatttcttaccttcgtaccgatgaaagaggagcgattcgcttgattgggtgggatcattggagggtagaaacggtccgctagagatgaggagaggtttgctttctatgctgaaaattgctattatagaaggtgaaatcaatgtaaaggtagaatcgtatgaacgcatttaagcaattttggatacagtatgcagatttttcaagtaagaccagtcgagctcatttttggctagcttttttctggaatttcctgatttctttgcctctttgggttttttacatcgtgacttctttatcccatcaaaatgctcaagaaatattcaatttttcaactgttcattctaaaacaggtctatgggcactcgctttcttagcattcttttacttcctcattttagtacccagtcaagccatttgtgtgcgtcgcttacgggatgctgggatccattggtcttggatctttttgaaccttggtccggttttactctatttattgtcagggctagatattttcctatttctttgggtgattacagttatttctctcctgattctcatgatgcttccaggaaaaaataccttcccacgaccagtagaaactcctatgggagtaacttctgaaccacaggttacagcgacagaaggaagctttggaggcaactcgtttgagcaaattcctaattttgtagcagctccagatttgtccgacgaaaaaccaccattggaacaaaaaatggttgctgaacacgaaatacactagactgatagagataagagagtttcatgcaagcaattaccgacactaaacatctgacggttcaaactctgccttctattcttgtcttgacaggcgaggatgtaggtcaatttgaatggttaaaaaaagacattttaaaaaaaataggctatgatccctcagatttgaattattcttattttgatatgaaggaagcctcctatgctgaggtagagctggatttggtcagtcttccctttttcgctgataaaaaaattgtgattttggatcacttgttggatctgacgactaccaaaaaacgctatttaaccgatgaagaactaaagcaatttgaaagttatctggaaaatccttctgaatcgacccgtttggtgatcattgcagaaggaaaattagatagtaagcgtcgcttggtcaaactcctaaaacgggatgcccaaatcattgaagcggcgactcctaaagagcaagaggtaaagcgctattttgcaagccaagcccaagaattgggcctgcaatttgtgggcgattccttggaccaactactcttaaaatctggctatgattttggagagttacagaagaatctcgctcttttgcaggcttataaagaggatggtcagattaccctcgaagatattgaggaggttgttcccaaaaccttgcaagataatatttttgatctgacccaaatgattctcaaacgccaaatcgatcaagctcggaatttggtgaaagatctccgcttacaaggagaagatgaaataaaattgattgctattcttttggggcaattccgaatgttttctcaagtaaaaatattttcagaagaaggccaatccgaaaaccaaatcgtagcgagcttgtcggagttgtcaggacgcaaggtcaatccatatcaggtgaagtttgccttacgggatagccgtaagctttccctgtcctttttgaagcaggccatgatgaccttcatcgagacggattatgcaattaaaagtggaacgtatgataaagactacttatttgatttggccctgttgaaagtggcaaatagcgtctaaacatgaatgaaattgcaagcagattagttgaataatttagctgtttgcgttatcatcaaatcagtaataaagaaaagaggaccataaaatggctatcattttaccagaattaccatatgcttatgatgcattggaaccttatatcgatgaagaaaccatgcatttgcaccatgataaacaccatcaaacatatgtaaacaatgtgaatgcagctcttgaaaaacatcctgaaattggagaagaccttgaaagcttgttagctaatgttgaatccattccagctgacattcgccaagctgtgatcaacaatggtggtggtcatttgaaccacgctcttttctgggaattgatgactccagaacaaacagctccttcagcagaacttgctgcagcgattgatgccacatttggttcatttgaagacttcaaagcagcctttacagcagtagcaacgacacgttttggttctggctgggcatggttggttgtcaacaaagaaggtaaacttgaagtcacttcaacagcaaaccaagatacaccaatctctgaaggaaaaacaccaatccttggtttggatgtttgggaacatgcctactacgtaaaataccgtaacgtacgtcctgactacatcaaagctttcttctcagtgatcaactggaataaagttaatgacttgtttgcagcagcaaaataataaaataaaggaatctataagagcgacaattggctcttatagatttttttgtttgtatccggaaaatcggagtataatttcttgcgtttggacaggaaaatgatacactagtaggagtgtgtcttacttatcagaagcccagtttgaagggcctaggcaaggaaaagatgaccgttaaaatgaaaactgaaacattcagggagaaatgaaatgactagtattaccattaccaaaggagcagttgagacgcctatctatttacggatgttgaatcgtcatggcttgattgcaggagcaacagggacagggaaaacagttaccctcaaggtcctcacagaaaaattaagcaaagagggcattccggtctttctagctgatatcaagggagatttatctggtttagccaaagcggggcaatggactccaaaactggaagaacgctacaaactgcttggtctcacagatccgtttgagccgcaagccttccctgttcgattgtgggatgtctttggccaagctggtcatcctgttcgtgcgactgtcgaaggaatggggtcattgcttctttctcgtctacttgatttgaatgaaactcaatcaggaattcttgcaattgtctttaaagtggctcaagagaaagattggcccttgattgatttgaaggacctgcaaagcctgttaaaggaagtctatgaacacagctcagactattcggcccaatatggtaatatcaccaaacaatctgtcggtgcgatccaaagaagcctcttggttcttgaagaagaaggagcggatcagtttttcggagagcctgcacttgatttaaatgactttatgcaactcgatgcatcagggcgtgggtatatcaatattctttcggctacaaagctctttcattcaccaaaattgtattcaacctttttaatttggatgttgtctcgtctctttgaaacacttcccgaggttggggatcccgaaaagccaaaactggttttcttctttgatgaagcccatctcctctttaaggatgcaagcaagctctttcttgagaaggtcgagcaagtcgtgcgcctgattcgttctaagggtgtagggatttactttattacccaaaatcctcaagatctaccagaatctgttttggcacagcttggaaatcgtgtacagcatgcgcttcgagcttatacaccaaaagaaatgaaggccatcaaggtagctgcccaaagttttcgtccgaatccagactttgatacagaaacagtgatcacagaattagggacaggggaagccttggtttctttcctgaatgagaaggggcaacctagtgttgttgagcgtgcttatattctctctcctcaatcgagttttgacctcttaaatgaaagtgaacaattggccttaatcacgacatcgcctttccatcaaaagtatgcgacgacgattgatcgggaatctgcctatgaaaaattagcagctaaagcaagcaaggaagcacaagaagaggagaaaaaagaagcagaaaaagaacgagctacggcggaaaaagcagagcaaaagcgcagtccaggtcgcccaagaaaatccagtcttgaaaaagctaaggattccttcttgagttccttattccggacgattgcgcgtgagatcgctaagctaattatgggctcctttaaacgaaaataagcctttgatgaaaagaaataatctttttaaaaagaaatcgttttctatttctgataattcttgttattttcagtagaatcttttataattaatctcgtatgaaaaaatattttaatctacgctcgatcatgattgcgatcagtattctattgtgcttagggggaacaagcgcactgggctacttgcatgttacgcaaccaacagcatcagcaattgaaaaaaaagaaaagaaaacaaaagaagcaaaagaaaaagatatagaaaagtctacgcctgagacgaaaaaaccacgtgtcaaatctcctgaagccaagcaagcagtggtcgatgcagacatggaaacgatgagtgcttatggccttgtctatgattatgctaataaggggttggtagaggttgtccaggatttcctagcggaaagtggaattgatccgtcacaagttgccttcacgtatcgcaatgccattacaggagagcaatttgccatgaatgatcttcaaccaatgacggcaggaagtacctataagctacccttgaacatgttggtggtggatgaggtcacaaaggggaaactcaatttaacagatcggtttgacattaacaatacctactatgaatatgtaggggaacatgacaattacgttgctgcctttgatggagccatgtctatccctgatatgcaacgctattcattggtttactctgaaaataccccagcctatgccttggcagatcgtttagggggaatggagcaagcgcgcaagttattcagtcgctatggtcaatctcgctcaccagaagtcaaaacctttagcgaagataataaaacgacaacggattattatatccatgtcttgcaatatctttggaatcatcaagaaaaatatgcagatttgttggaattgattggggaatctttcccaggtgagtactataagaaattcttgccagatttggtcattcaacaaaaaccgggctatgttgcggaagcgctcaatgtggatgccattgtccatgaatcgaccccttatttggttgccatctatactgcaggactgggtggaacgaccccagaaagttctgaaatcagtggtgttggtctttatcagttgggagaactagcttatgtcatcaatgaatggcatcgtgtgaatatgaatgaataattgacggaagaggctgggacaaaagtcctggcctcttcaattgtctttggattatcgagcaagacgcagtggttgagtgggctctactacgctgatttcatcagcttttacagccctactcaactatgcggaggtaggacgacgaaatcgaattctaacgaattaccgatttctgtcccactctcttttcttctatcacagtagcttaaaattcacttggtgtttcgaaatacttttctgttttatagaggcttctttccctcttctatcaaaaaatatgttatactaattaatagtaataagaggaagtatagacatgattacaaaggaagattaccagttggtccgctcgcatccagccttctctgcgttgccagtggagctatttgataaattagctgttgaaattcatgctagggatatacaaaaaggacaaattttattttatgcaggagataagcgggatcgcatttttcttctggcaaaaggctttgctcgcattgagcaattcgattcgtctgatcaattttcctatatggattatatcaagaaaggggccctgttcccttatggagggatgtttcaggatgagcgttaccactatacagctagtgcggtgacagatttgcgttgtttcgttatccccgtcaacctctatgaattatctgcccaagagagtaaggagcagttgctcttcattacgagaaagctctcgtcaattttagaatttcaagagttgcgtctacgtaatgtcgtgacagctagtgccagtgagcgtgtggttcaatctttagctatcttgtgtaaggactatgaaagtttaggaaatcaacttccatttccaatcagtatgaaggaaatggccaaattagcggccacaacccgagaaaccgtcaatcaagttttaaagaaactcatcgattctcataagatacagtatgagagaaaacaattaacctttttagatacagcctactttttaaagagttttaaagagatcaattaatttgttgatcttttttatttttgtaaaaaaatatatattcataaaaacaatataaaaagcaaaatatgcaaagaaaacgcttcatattaactaaaaaataggaagaattcaaaataatgccaaattctttgcattcaaaaagtagaatccttcgtgaaagcggtaacaataaagaatataataacaattgtaataaagcttatgaacaagctcgaagaaaaaggaggactatagatgtctacacacccaattcatgttttctccgaaattggaaaactgaaaaaagtttgtttgcaccgtccaggtaaagagttggaaaacttgatgcctgactatctagagcgtcttctttttgatgatattcctttcttggaagatgctcaaaaagaacacgacaattttgctcaagcgcttcgtaatgaaggaatcgaagtactttatcttgaacagttagctgctgagtcattgacttctccagaaattcgcgatcagttcatcgaagaatatcttgatgaagcgaacattcgtggacgccaaacaaaagttgcgatccgtgaattgcttcatagcattgaagacaaccaagaattggttgaaaaaacaatggcaggggttcaaaaagctgaacttccagaaattcctgaagaagcaaaaggattgacagaccttgttgaatctgactatccatttgcgattgatccaatgccaaacttgtacttcacacgtgacccatttgcgacaattggtaatgcagtatcattgaaccacatgtacgcagatacacgtaaccgtgaaactttgtatggtaaatacatcttcaaataccacccagtttacggtggaaaagttgaacttgtatacaaccgtgaagaagatactcgtatcgaaggtggagatgagttggtcctttctaaagatgtattggcagttggtatctcacaacgtactgatgctgcatcaatcgaaaaattgttggtaaacatcttcaagaagaacgttggcttcaagaaagtattggccttcgaatttgcgaacaaccgtaaattcatgcacttggatacagtattcacaatggtggattacgataaattcaccatccacccagaaatccaaggtaaccttcgcgtcttctctgtaacttatgaaaacgaacaattgaagatcgttgaagaaaaaggtgatttggctgaattgcttgctgaaaaccttggtgttgaaaaagttacattgatcccttgtggtgatggcaatgtagttgctgctgctcgtgaacaatggaacgacggttcaaatactcttacaatcgcaccgggtgtggtagtcgtatacgaccgtaacacagtcacaaacaagaaattagaagaatacggacttcgtttgatcaagatccgcggaagtgaattggttcgcggtcgtggtggacctcgttgtatgtcaatgccatttgaacgtgaagaaatctaatgtagaagaccgagagctggtcttgagggatcagctcttccttcttactgatcaatactagaaagaaaataggagacaattagaatgacaaattcagtgttccaaggacgtagcttcttggcagaaaaagactttacacgcgcagagttagaataccttatcggactttcagctcacttgaaagaccttaaaaaacgcaacattgaacaccactatcttgctggtaaaaacattgcgcttttgtttgaaaaaacttcaactcgtactcgtgctgccttcacaacagcagctatcgaccttggtgctcacccagaatacctaggtgcaaacgacatccaacttggtaaaaaagaatctacagaagatactgctaaagttcttggacgtatgtttgacggtattgaattccgtggtttcagccaacgtatggttgaagaattggctgaattctcaggtgttccagtatggaatggtttgactgacgaatggcacccaactcaaatgcttgcagactacttgactgttcaagaaaactttggacgccttgaaggtttgacacttgtgtactgtggtgacggacgtaacaacgttgcaaacagccttcttgtaacaggtgctatccttggtgtgaacgtacacatcttctcgccaaaagaactcttcccagaaaaagaaatcgttgaattggcagaaggatttgcaaaagaaagtggcgctcatatcttgatcactgaagatgctgacgaagctgtgaaaggtgcagatgtactttacactgacgtttgggtatctatgggtgaagaagacaaatttgcagaacgtgttgcccttttgaaaccttaccaagtaaacatggatttgattaagaaagctgataacgaagacttgatcttcttgcactgcttgccagccttccacgatacaaacactgtttacggtaaagatgttgctgaaaaattcggcgtagaagaaatggaagttactgacgaagtgttccgcagcaaatatgctcgtcactttgaccaagctgaaaaccgtatgcacactatcaaagcggttatggcagctactcttggtaacttgtacattccaaaagtttaagactttataaccgtataccaacagctataggggctggactgctagctttagtcctgcccctattttttatagaaagggaaaattcatgtcaagaaaaatcgtcgttgctttgggaggaaatgctattctctcatctgatccttctgcgcaagctcaacaagaagcacttgtagaaacagctaaacacttagttaaattaatcaaaaatggggatgagttgatcatcactcacggaaatggtcctcaagtagggaacctcttactccaacacttggctgcaaattctgaaaagaacccagctttcccacttgattcactagttgctatgaccgaaggaagcattggctactggcttcaaaatgctcttcaaaatgctcttcttgaagaaggaatcgaaaaagacgtggcttctgttgtgacacaagtcgttgttgataagaacgacccagcttttgtcaacctcagcaaaccaatcggtccattctactcagaagaagaagcaaaagcagaagctgaaaaaacaggagcaactttcaaagaagatgctggtcgtggctggcgtaaagtcgttgcttcaccaaaaccagtggatatcaaagaaatcaataccatccgtactttgttgaacgacggtcaagtagttgtagctgccggtggtggcggtatcccagttgtgaaagaagcagatggtagcttatctggtgttgaagcggtaatcgataaagacttcgcctctcaacgtttggctgaattagtagaagcagacctcttcatcgttttgactggtgtcgattatgtctttgtgaactacaacaaaccagaccaagcaaaattggaacatgtgaatgtggctcaattggaagaatatatcaaacaagaccaatttgcaccaggaagcatgcttcctaaagtagaagctgcgattgccttcgtcaatggtcgtccagaaggaaaagcagttattacgtcacttgaaaaccttggcgctttgattgagtctgaaagtggaacaattattcaaaaagactaatgaaagattaggaaaaaactagtattttaaagcttattgtgatagaataaatctataggtaagcgttttacaagagactcttgtaaaacatcactcacactttgttgcgttaggaggaagacaaatgagtgaaaaaacgaaaaaaggatttaagatgccttcatctttttccgtattgttaattatcattgctattatggcagtgttaacttggattattccagctggtcaatacaaggttgacgatgcaggtgctatcattgcaggtagttatgaatctgtaaaagcacatcctcaagggatttgggatgtcttgatggccccaatcaatgccatgcttggtaaagcaccaaccagtgcagcgattgatgtagccttcttcatcttgatggtcggtggtttccttggagttgtgaacgaaacaggtacccttgatgtagggattgcttctatcgttcgtaaatacaaaggccgcgaaaaaatgttgatcttgatcttgatgccattgtttgcccttggtggtacaacttatggtatgggtgaagaaaccatggccttctatccacttcttgtacctgttatgatgtccgttggttttgacagcttgacaggggtagccattatcctcttaggatcccaaatcggatgtttggcgtcaacattgaacccatttgcgacagttatcgcatctgatactgcaggtatctcaagtgcttcaggtctcttacttcgtgtgatcttctggatcgtattgacaggacttagcacatactatgtataccgttatgcagataaggttcaaaaagacccaaccaaatccctcacctatgcaactcgtgaagaagatttgaaacacttcaatgttgatagtggcgaagaaattccttcacaaatgaacaagaaacaaaaacgtgtcttggtcgtcttcatctcaacattcgttatcatggttgctggatttatcccattcaaagatttgggtattacattctttaacaactttaacgaatctctccataaaattccagtacttggtcaattgatcggtaacacagatgctcttggtacatggtacttcccacaaacagctatgctctttgccttcatgggaatcctcgttggtatcatttatggcttgaaagaagataaaatcatttcatctttcatgaatggtgcagctgacctcttgagtgttgctcttatcgtagcggtagcacgtggtatccaagtcatcatgaacgacggtatgatcactgcgacaattcttcactggggtgaagaaggactgaaaggtctttcatctcaattgttcattgtcttgacttacattttctacttgccaatgtcattcttgatcccatcatcatctggtcttgccagtgcaacaatgggtatcatggcacctcttggtaaattcgtcaatgtaccaggtagcttgattgtcacagcttaccaatctgcatctggtgtcttgaacttgatcgcaccaacttcaggtatcgtaatgggagctcttgctcttggacgtgttgacttgagtgcatggtggaaattcatgggtaaattggtcgtagcgattgttgtgatcaccattgcccttcttctactaggaactgtggttccattcttgcaatagaataaagtaggtgtttcatgaaaaatagaataaagaacgatgtaaaagagcagtttttaaactcgcttcaaaccatcatttcttacccctcagtattaaacgaaggggaaaatggaacaccgtttggacaagctatccaagatgtcctagaaaaaaccttagagcttgctcgagaattaggttttcaaacatatatagatcctgaaggatactatggatatgcagagatcggtcagggggaagaactcctggccgttctttgtcacttggatgttgttccagccggtgatctaaaagattggcaaacgccaccttttgaagcgactattgtcggtgattatttagtaggtcgtggtgtgcaggatgataaggggccgtccctcgctgccctctatgcagttaagagtttgttggatgatggcatccagtttaccaaacgaatccgctttatctttgggacggatgaagaaaccttgtggcgctgtatgaaccgctacaaccaaatcgaagagcaagcagatcttggatttgcaccggattcctctttcccattaacctatgctgaaaaaggcttattacaagttaaattgcatggtccaggttgggatgatcttcctttacaggctggtcaggccctcaatgttgttccggataaggcgacctatgctggtcatcgtttggaagagttgcttcctgttttggatcaaagtggggttcagtatagccaaacagaagattctgtaacggttttgggtgtttctaagcactctaaagatgcagctgaaggagtgaatgccattgtcggtttagcggaaagtttatccctcatccaaccccatccagctttgctctttatcgcagatgctgttggtgaggatgcaactggagagactctatttggcaaaattacagatgaaccaagtggcgatctttccttcaatcttgcgacccttgtgatcgatcaagaacaatcggaaatcgggattgatatccggatccccgtcttagcagacaaggatgccttggtagctcgtttgcgagaaattgcagctagttatcagttggaatatgaagagtttgattatctggctcctttatatgttcctttggatagtcctttagtcagctctttgatggccgtctatcaggaagaaactggtgataagacaccagctatgttttctggtggtgcgacatttgcgcggaccatggaaaattgtgtcgcttttggggctcttttcccaggtgcagaacagaccgagcaccaagccaatgaacgtgcaaaaattgaagatctttacgcagcgatggaaatctatcgagaagccattcaacgcttagctacaacgtaaaaaatttggaaaccaagtttctaaactttcagattgaagacaaacttatactaaaaactttccttaggtgagtacggacgtcagcgaacttctacgaagttccaagactaaatcaagatactaagggcgtctgcggataaagtcaaaataggaagtttgacgcggaatctttcgattctaggagaacttatctttttgacacaatccgcagcccgtgttcaatttgtattgagccccctcgctctttaatttctgggctcaggctaaaacagtttcctaaactgttttactctcaataattccgagtgcctgaaacaattttgtttcaggcacttttctctcagcggaaagtttcagtgttttcttaattcattcaaaaaactagaacacattttaatttttttgcagaatcgctcaccttattttaagatagtttatctacattttaaaaagtttggaaactcggtttccaaactttttatttactaaagaagaagggtggggtgaattcttttaatttttcaaaacaatccaaagctccttggttgttttcgcagataaccaaacagacatcgtctccacagatggtggctacaatttcttggagttccagtgcatctaagattgctccaaaggattgggccagacctggaagagtttttacaacgacctggttttgaacggggcgcaacatgactaaggcatcttccatatacatccgcaggcgcttttcccaacgggaaggagcgatggtgttcatggcatagtaggaactatccccctcgttaatttttactagattcaaggatttgacatcccgtgaaagggtggactgggtaacgagaacaccattggcttctaaggcttcctggagttcttgttgggtatgaatcctacgctcagaaatgatcgagcggatcaagcgatggcggctttcaattttattcatgagagactcctttacttgatgaacatagcatccccaaagctgaagaagcggtagcgttcttgaatcgcatggtggtaggcttcgagggttaattcgcggccagcaaaggcagaaaccaacatgaccagagttgattttggaaggtggaagttggttgaaaaggcgtcgacgactttccattcataacctggtttgataaagatattggtccaacctgaatcggcttggatgtctccatcaaatttattgccaattgtttcaagggttcgaatagaagtcgttccaacagctacgatgcgttttcctgcagattttacctgacgaagggtagcagcagcctcttcagaaagttggtaaaattcagagtgcatctcatggtcttcaagattgtccacggatactggacggaaggttcccaggcccacatgaagggtcaaatagaccaggtgaaccccttttgcttcaatcttttggagcaattctttggtgaaatgaagacctgccgttggagctgctgcagaaccattttctttggcgtaaacggtttggtagcgctcgcggtcagcaagtttttcgtgaatatagggaggaagtggcatttcaccaaggctttctagaacttctaaaaagatcccttggtagtggaagcgaacgatacggcctccgtgctctaattcttcctcaacggttgcggtcaaacgaccatctccgaagctgactgtggcccctacctttaagcgttttgcaggttttgccaagacttcccaacagtcatcttgcgtatttttaaggagaaggaattcgacgtgaccacctgtttctggtttgactccatgaaggcgggctggtagaacgcgcgtattgttcatgacaagagcatctcctggctccaattcatccaaaattgcatcaaaatgacggtcttggaattgccctgtttttcgatcaaggatcaagagtttagaggcatctcgtttttcaagaggggtttgggcaatcagttcttcaggcaaatcaaagtcaaagtcgttggtattcatttgcgctccttttataataaatttgtgagtagatagatggtagtcccgacagctaagagcatcaggcagattcccatcaaaaagatcaggaccttgagaatctttctttgatgaatcaagaaagataagagaaagacaaggagtccgatcaaaaaaatgatgaataatagtgatacaatcatacctttcattatatcatgaatcgacttgaaaatgaaaaaaatgccagaaaaagatagcggtttcacttgacaaaaattggtctataccatataataaaagcatagagaaataggaggtctatccaatgaaaattattgaagtaaaggaccaaattgaaggtggaaaagttgcctttgatatattaaaagaaaccttaaaggaaggtgctcaaaccttaggtcttgcgactggaagcagtccccttgagttttataaacaaattcgtgaaagtgatttggatctgtctactctaatcagtgtaaacttagacgaatacgtaggcttgacgggagatgatcctcaatcttatcgttacttcatggagaaaaatctctttgatgccaaaccgttcaaagaaagctatctcccatcaggtgttgaagaatctgccgatcaagaagtgatccgttataacaaaatactcgaagaccatccagtggatcttcaaatcttgggaatcggacgcaatgggcatatcggttttaatgagccagggacatcctttgatagtcagacccatttagtacagttggatgactctaccattgaagctaattctcgtttctttgataagatcgaagatgtaccaactcaagccatttcgatggggattgccaatatcttagcagcgaaatcgattgtcttgtttgcctatggggaatcgaaagctcaagcgatcaaaggtacggtagaaggtgaaaggacagaaaaagtgccagctagtgcccttcaaggacatccaaatgtgaccattattgcggataaggaagctttgagcttgttaagtcgataaaaaacaggacctatcgccgatttattcaggccagataggtttttttctgcttcaaaatatggtacaatacaagtaattatctgctgggattagctcttttcatctactgggagacaagaggaaagggcatgagggctagaagcttattttagcctccagctgattagtctgttatatgttataaaggaaaagtttatgataaaaaaatatttgatccatatttgcctccttctgagtctcttatgccagccaattctagcgagtgcggatgaattggtggatatggcgcaaaagatgtatccaaatgacaatgtccaagccattaaccgtccgcattcttcgcttgttattgatggaaatacaggaaatgttctttggaaggacaatatcgatgaagtcagagatcctgccagcatgagtaagctcatgacgctctatctcttgtttgaagatatggcaaatggcaagatcagtaaggatacagtgatcaaggcgaccgcttcagaccaagcgatcggaaagatctatgagatctccaacaataatattgttgctggggtagactacaaaattcctgagttgattaccatgacagtggttccatcctcaaatgtatcgaccctcatgttggccaatcttatgtccaacaatgatccagatgcctttatcgagcgcatgaatgccaaggctaaggaattagggatgaccaacacggtctggaataacccgagtggggcggccatctccaccttgcaaggctactatcaggtaaacaattatccaaacgatgcggccaatcagacaactgcgcgtgatttagggattttggtctatcattttatcaatcaatacccagatattttaaactataccaatcaagcacaagtcacggtcaaaaaagggactccgtatgaggaaacctttgatacctacaattattcattgccaggagccaagtatgctttgaaaggtgtggatggtttaaaaactggatcaagccctcgtggagctttcaactatatcgcgaccatcaaacggggcaatcagcgcttaattgctgtcattatgggcgtaggagattgggcagaccaagatggggaatattaccgtcacccgtttggcaatgccttgatcgaaaaagcttttaaagattttggctataaaaaattgttagatgcaggtgtccagaagattgacggcaagacctatacacttgaaaaacccttctatgcaacggttaaaaaaggtgctaaagaaccgacccttgcggtaaaagatggctatctgacagtagataatgatctctacacgttgtctgaaggtatccgagatgatatgaaggtggaagaaggagccaagccagagcttgtcaaagaaacagcaagtgggaaaaagacaacggctaagcacagtaaatggctttcgctggatcacttcctgattttgattccgattctcattattgtcatcattctctcgattgaaaaacaaagtcgtgagagacgcaaaaaagaggctcaaaagcgctataataaagaataaaataaaacctaactgattgtcagttgggttttgtcattgtcccattccgatatttttagaaaggattcatatgaaaaaattccgaaattcttatgcggcttatatgctgctctatagtttttattttatgtccacctctctctttacgaccctcatttccgtctatttgatgggaaagcactatagtgcaactcaagtgtcgaccttggtatcgattgcctttttcttatccatggtagcccaacccttctttggttatatcaatgagcgatttggaatcgtaaaaatgacgaccctcagtctaagtgtgatcattggtggtgtcttcggttttctttgggcccccaatctcttttggctgactgttttttacgggattgttctagtctgtttgaatgggacagctcccatgatggaagtatttgcaacgcaaagtccatacgcttttgggaagattcgcgtttggggaaccattggctactcggtcggtgttcaaatagccggctgggtctatcatcagtttagcccccaagctgtctattatacggttttgatcaccattgtattgagtctcttctgcctaagtgcggttcgaatgaagaaaaaagagacagtcgtagaaaaggaaaaacatcctgtctctattcgtcctcttcttcataatggaccttatctcttctttatcattttgattggcttggcttcaggggttggaaatattggtcatacctatattcctgagttgctcatggatagtggtctaccagtccatattgcctctacggttgtagctatctccgtcgtagtggaagcccccttgatctttttctctgatcgattcatggaccactggcctttacgggttttgatcgctcttccaatcgggattatttttgctcaatatgctgtctacgctcttccaagtcctgtcttcttaaaagtgcttttgactcttttagccaagcatacaacagggatggttttgattatggtctccttacggtttattgcccaacaggtgaatggcaaagacttggttcttgccatggccattgtccaaggagctcgttatttaggaaccattcttttacaacccttcgcagccctctgtattgaaagaggtggttaccaagtcatgagtttctttttagcaggggttgtagggatcgtctttttactgagctttgccttaaaaatgccccaagggaaggctcacggcctttttggtggcaaagtagactaatgaaattgttacaattgtatgactaatcatcgaggagttggacagaaacactgatctcatagtgttttgtccaacttttttgctattattaagaactagtgattaatttgacaatcaaagtattcgatgatagaatgaggtaaaataaatataaaggagaccattttatgaaaaaaatgatcttatcgacagctgctcttttgacgattgtttccctagctgcttgttcaaacaaacaagacacaaagaaggaaacttcaaatagtcaatcaactactaaagtgacgagcaaatctgccaacacttcgaaaagtaaggatacttcaacagattcagaagatacgtcatcttctagcctcttaacagatgctgaaatcagtaaagcaaaaactgttggggacttcaaaaagttgtttgcaaaattaatggatcaatctgtttcacttaccgaagaagcaggtacttctgtgacaggttctgcaaaagagcaatacgatgcaactgttagcgccttgaagcaagaattggaaaaccaaaaagatatttttaatgaaggcttgaaaagcatcggttcagatagcacagtcgttcctaaagaagaccgtgaagctttgatcgaaagcttgaaagatgctcgagaagagttggaaagtactcgtaaagaaatgaaagatatgcagaaagaattgagtaaatctcctgttgcagatgacgacagtgatgattcagattcagattctgaagaataaaaggaagaaaaggttggaatttccagcctttttcttattttttttcgaatgatatagatgaggaggtgggcctatgtttattgccatggataacaatcaaaagcggtggaactgtatggaagagatcccagctgtgacagaaggtcccttctattgcttggtttgtcatagtccagtgcgtctaaaaaatggctcggttctacgggctcattttgctcatataaaattacagcattgtccctatcatcacgaagctgagagttttgaacatctggaattgaaagcttgtctttatgattgggcctctaaggaatctaatacagaggtagaaagttatttagcagattttcaacaaattgccgatcttttggtagtagacaagaacttagctttggaagtgcagtgtagctccctatctttagaacgcttgaaggagaggagcgatgcataccgatccaacggttaccatgtctattggttacttggtaaaaagttgtggctcaagaaaagactaacaaagctgcaggctggctttctttattttagtcagaatcgcgggttccatctttgggaattggatctgacaaagaaagagttacgtctgcaatacctcattcatgaggatttacgagggcgattgcattatcaaacagaaattttcccttttgatcaaaggtctttactggaagtcttacggaccccttatctttcgcaacccatgcagcaaatggcagtcgagctcgatcggacatttttaacgtatatacagcagcaacttttttatcgtcacccaaagtggctgaagcttcaggaagaactctatttacagggacaccatctgatggaactggagctagatttcttttatcctctttgtcgtccgatcctttcacagaacttgcttcaaattgaagaggatgtagaagattactaccagcagtttatgacctattatcagtcgcaagggatccaacctgttcagatcctctatcccccacgtttttatgctcaacagaaaagctaactttctaagatagaaatcctcccgaaatgttcatttttatgctaaaatagtgatatccaccccctaaacccttgataacactgactttctgaggagctggaactgactgaatacgggattgaatacgacatatttatattaccatatattcaagtagtttttccacggtatcagtccgctgttcttccgttatgtgggtgtataaatctagtgtgattttaatagtgctatgtcctagtctatcggaaatgtttttggggtccacaccagcgctaaataacaatgaagcgtgtgtatgtcgtaagccgtggggtgtgattggttttagaccgtggtcagttacgaagcgtttgaaatagggaatgaaattatgaatatgtacccaatcgccccgctgatttgtaaaaatgaaattatcatcaccttcaaaatgtttgccattcttgaagtaaatctttatttggtcctttttccaattcttcaagattgaaagagtgttaggatcaatagaaatcacgcgcttgctattttttgttttaggtgtttgaagactttgtttctctttgatcctgaccgctgttttattgacagtgatttttttatcttcaaaatcaatatcagaccatttcagggctatggcttcaccttgtctaaggccggtataagccattaaatggaccagcggaaagaaataagatagcgtagcattttgcgctagttttaaaaattcttttaattcttccttggttaagaaattccccttcctttgagtttgccggcttttcggtttgatcaccttatcgaaagggtttgaattgagtacatccattaaaacggcgtatttaaaaattcgattaatgacagaaagatagtgattatataggacgtagcttttacttaattcaataaccactctttggcagtatgtgactgtaatttgttttagcttcagccctttaaaatgttcttccgtcattttctcaactttggaccggacattttcaaaggtgctaggcttgaccgtggttttgtaattttctaaccacattaaagctagttcttcaaatgtcgggtttggaatttgggaagccccggcacttggaaggccgttttcttcaatgtctaaaagtaggtttctttcagcttgtttagcttccttttgagttctaaacccccggcgcgtggtccttctttccttaccggtcaaagggtcaacgcctaaatatgtttggaataaatagcggatttccccgcttgtagtagtatatttctttatcattgtcttttcctttctttgcttgcccgcatagttgaaaaagtgaaatgaatttgttatactaccttcgtacatagtatttctttatcttttcctttccagcttgccaaagccggaaaggctttttttatttatataaaagttcgattaattctattcctgaatctgaaaagattcctgaatcaattaatttctgtttactaacttccaaatattccgggttatctgaccttttagagatttctaattgttcggaataataacgtttaatgaaattactttcttcaccttctaggcctttatacattccttcaacggattcagcaaaagccctaacttctttattttccgggaaggcttcacacaatggcgctagtttagaaagattgtctaaagtatgctttaatgaatctgaatagatttcaagatctgaagtagtcattaatggaatagaatacttctctatttgtttcatggcttcacttgccccggcaagttgatccgtttttattttttctttatcaattatttttatattcccgtttgtatcagcttttaaaaacaaggctactaaggcacaatataaaccaacaaagaaaggtacagtagtccaaaagaaacacagggacaggaagccttttttcttttggcctgaatagaaatattgcgccccaaaaattcctaggaatacagctaaaagaatatacattactttattacaaatatattctttagtttcaattctataaaagctataccctaccaattcaggttccgacgccgttcgcttggtattattacggcttccgttctttaatggttttaaagggtcaaccgttaatttatgataagccttattgtaaatcgcctttttagggttcttaatataccccattcctttctttccgtataaagggtttactgatttttttaaagttctatttattcttccggttgtcctagccttaaaactctttttaaggctgggtgttctaactccaattttcatttttaaaattcctttccctaaatcaaggccttatattcttccttgatcatgatttcatccgtgacagtagtaagctggtaatactccatgaatttcatataattaaaatccgccttattttctaattgagaaagggcgtcttttaataagtgatggatcatgtttctattcgcttcattctcacagcgtaccctagcattagtatattccgccgtggtgtggtcaaggtggcctaattcatgaagtaacactttcattctttcccgcttgtttagcttgtcagaaatgaaagcggtccgggttttaggatcataaaaaccaacttcatccggcaacagatcgccgttgaaagtgtgtacggtaatatcataaccctttaaaatttctttttcagtcaaggcgttttacctattcttcagtcccctttagatatgcttctataatggattgaattactttcttcttttcttcagttaattcacgcccgccgaacatcatgacgctattcgcaatttcttcgacattaagggcggtttggcctgattgatcattagaagcaatagtagggctttccgacttccctagtaaataatcaacagacacttctaaatagtccgcaatttcttgcaggcgtttggtgctgacattttgacgttttaaagaatacaaagtatttctactataccccagcttttcttctagctgatttaaagaaagaccccgttttttcgataattctttaattttttcaaacgtgtaaagcattgatttatcaacctttcttggagattgacaaaaatattttaaattattttattaaaaactattgacaattttaaataattgatttaaaatgatttttgtaagtgataagcaactaaaaaaacaactaaaaaacaactaaaaaataaaatgataaaatcaagttttggcgaaccggttttattaaatttgctagtgttttcttatgtcttcattttaaattatctgtttaaaattgtcaacaataattttaaaatatatttaattttttagttgctttccgtttacaaaaaaaaacacaaaaggaggaaacataaatgccggatattgacgtaggacgaaaaaaagtagttgctttcttggaaaagaacaacattaaaaaaagcgatttggcttcagtgtacggccgggaccgtcaagaagtaactaacattctaaacggttcaacccgtgggccaaaagcgaacaaatttattctgcaagtcattgctgattacaacattgactaaacaaaaagaagcacccaaagaattgagcgcttcagaaaattttaactacctacattataacacaaactagcttgcccgcatagttgagggggtggaaatggaaaatataagtttaccgcctttaataaatgatgaaatagctaaaatggccataaaagagcttcttcaattcgcaaaagaagaagttaggaaagaaatggaagccgaacagctcccaataaatcaaaaaactttatgtaagaaatttggatttgaccacagctatattaaatatttaagacggaaaggcctgaaatacagaaagcaaggccgggataatatgtacgacttaaaggacgtatatgaaatttttgaacaattaaaggagattgaacaatgttagaaccaagccaaacaagccagcttttagggacagtaacggccgggacattattcttcagcgctggtttccttgcttcagtgattgaccatagaatagcaaagaagcgtgaaaagaaagcccaaaagatcgcagaattacaagcgttttgggatcaggaaatagccgaacatgatcggaaagttattgaagaatacaataatcaaatggcgattttaaggaaacagtctatttctgataatgattggagcctagacaatgttttttaaaaaagctagaaagatcaaggagcttgaagaacttatagagatccaagacagccgaatacttgaacaaggtgaccttctacgggtaacgcttgaaagagaaagaaagcttacaaggatcaaaaataaacaagacgtccttataagaagccaaaaagaattaattttgaaatataaattaatgattagtaactatcaatataaagaaagtaaagaaagaaatgtgaggttttaactatgctttatgaattagtagggcagtacctagatatctataatatggatattgatgaagaaaccaagctggacactatcgaagcgctggggctggacgaagaaatagaaaccaaggcggaaaattacgctatggtgatccggaacctagaagcagaaaatacagcttacaaggctgaagaagaacgccttaaaaagaaacgtgaaaccaacactaaaaaaattgagtggttgaaacgtaacctacagggcgctatggaagtaacaggaaaaaccaagatcaaaggtaagctgttcactctatcggtccaaaactcaaaagaaagcgttattgtggatgaagcaagcctacctaaaaaatattgggtgaaaaaggtaactgaagcccctgacaaaaagggattgtatgaccttttgaaagaaggtaaaaaagtgaagggcgcaagccttcaggaaaatcgtagtttaaggattcgataaaatgaaaattttaactattgacccttcttcaaataaggccaaagatagcacctcagggattgcctaccttaataatgcccgtttaataaattattgggtagtacctaaagggctaccacatattaaacagtggtttgatgaaataggctatgaactaaccccggacgtagtaataattgaaaaatttgaagcgcgtgacaatgacttatctaaagataattcagtaatggaaactatcgcttactttcagttattttttccggaagctattctacagcgtaacgccggttatcaatcggacgtaccaaatgaactactaaaggccctgaacctttggaattttagcaaaagccatcaccaagacgtgagggcgtcggtccggctgggcttattttgggccgtgagaaacgacattgaagaagttgtttcagatattggaaaggcggtgatagaaaatagcgatacagcttaaaaaatggcaagaagaagccgtcaagcgtagcgatagactaacaaacggtatctttttagaagcccttgggggccgtggcaaaacgatttgcgcccttgaaatctgtaagcataagaaagctaagaaagtcttaatcttaaataaccgcttatccattcttgaaggctggaaagacacggttcaaaagttcaattattcggataattgcgattttgaaattataacggatagaactttacagaatagggttaaaaagggccttaaaatcgcttgtgacgtcttaataatagacgaatggcagaatatgagtagtgacaaattaaggggcttatatcgcaaaataaagcgtaaatacactatagggctatccgctaccccaatacgaaaaaaaggcttgaatttctacccgcttgaaaaaacaatctttgggcgtgctgatccaaataataaatttgattggcagaaaacacatggccaaatggtttacgatccgttttcttactctaaagaaaaatggaaagactttaaaaactatgaaagctatgttaataatctccctaacttcttccgctgggaagaaatcgaaaagattgaacaggcgacagaaaacaacggttacaagatccgcttctataagaacactttaaaagtcgaaaatccggaacttttaaagaaattcagaaagctgaatttagtaacggttaatggaaagacggccatagcaaaacaatcctttggccgggctacctttgaacgttacttacagcaaaccggggtagaagttgactttccaaagttgaaaccaacaaataaaaataccccactactgaccacgcttgacggtttaataaagcgaactcctgaagatatgcttatagtcagcaagtccaaacagattgtaaatgtgatccacgaaagacacccaaaaataggaatatggaccggggaccgacaggaaggactagaaaacaaggtagtagttgctactagtcaagtcctaggcgtcggagtggatggcttacaacacaaatacaagactattgtagtgctggacccggtaagtgaagaatccggggagtatgacgattataggcaattactttggcggatcacgggaagcaggcaacagcatgatgtgaacgtgatagagttttattttaaggaaggataacagatgaatattgaaacaatcgtattcagtacacttattttcctagtagggtttctgctaggggaacgcgcaacagaaaataaaaaaaagaaagataatgaggaacaaaacaatgactaaagtaactactaaatattatgtattccgtgacaaagaagaaggcgaatttttggctaaataccaaagtaaaggcacacttgcataccatgccgaatatacggatgaaattcataaagctttaacaatgattccggaagcttatgaagtacaaaagaaacaaatgaaattgcttgctaaaacgctaggcgctgaaatcattgaagtaaacgcaacttttgaactaacctacccaaacggggatgaaatccgtgaaattgaaaaggatgattcagatggccttggtgactttggcgaatttctaaaacgccgtttggctgaagcgatctttggggaaggtgaataaaatggcctttaaactacctgaaaacaaaccacagatccccaaagacacgccccggaatttcttcttctatggtgaaacaatgtcagggaaaagctaccttgcgaatgagttcccggcgcctatcgtcctaaatacagatggtaacgctgaagcgaataccgtcccttcaatccagcttgtgaatgaaaaggatgaacaagggcgaattactaaaagcgtcatttctcagattggtgaaattcttttggccttgcaaactcaaaaacatacctatcaaaccgtagtagtggatgtgattgatgatgtaattgaaatgatcaaaattgctgtttgcgacgaattgacaccgcccggaaagccccgcttgaaatccttgtcagaaattccttacgggaaaggctacgatttcttcaatcaggcgattactgaaatggtaattgacctaaaggcccttcctatgaatgtcatttatatcagccggcaagtttccgaatatgatgataatggcaacgctaccaaggataaaccaagcttaaaggacaagtatgtaaatctaattaatggtaattctgatttgatgatccatactgaaaaagttggtaacaactataacagggaagtagaacgcaaacgcaagaaatactacatggatcaggttgatgataaggctatcttgaagatcttgtcaacaatccgcggggccttggaaccagcaaaagcaccaagcaagccggcaccagctaagaaggaagaagccaaggaagaaaaaccaaaggcgaccaaaccacagaagcaggaagctgtttctgaagatgatcttttctaatacaacaatttcaaacaaataatttaaaacacaaaaggagaattaaacaatgagtttacttgacattgcacaatcaatcaaaaaagaagggtttgaccctcgcaaagacagcgcaaacggtccagcaccaattccagccggtgagtaccaagccattctgaaatctgtacagtttaatgtagcagaaagcggatgggaaagcctacaatatcgctttgaaatccgcgggggtgattacgacggccggaccgaatacgtttcattcggtaccttggacacttggaacggtaaagatattggatggtctgtacaacgtacaatcaagtttttccaaaaagccttggcctttgcagaagacgcacccctaaaatctgattttgatgatggtaaggctcttgaagaagcccttaaccgtaaagcggtaggaacctactatactttggtaatcattgaatcggaaagcaagggtaaaacttaccgcaattatgatcttaatgaagctgaaagcctaccaaatacaagcgccgtagaagtaaatgatgatgatctaccattctaatttttaggagtaaatacgaatggcggacatgaaatactacgctttacaatatcaaaagttaggctttgccgtcattcctatcaaccctaaaaataaaaggcccatgatagagtttgcggacaagcccaaaatgacggcggaagaaatagaaagtttttgggaccagcacccaaatgctaacatagccttaaagacaactaatttctttgtgattgatattgataagcatggaaaagaaaacgggtttgaatcgctcaaacgctggaagtatttaaacctgattgaaccgaccttacaagccaaaaccgcaagcggtgggaagcatttattctacttcaaaagggaagatagcccaatcactcaaatgatcggctttctccccggtgtggatataaaagcacatgaaaacaattatgttttggtagcaccttccgcgactgaaaagggtcagtatgaatgggacctagaaaagtctagtgaaggcgggacaatggtaacaccttctaaggaactgattcaagccctgaagaagacctaccaagaaacacacgggtacagatcggaaggtttgaaggacctgaaagaaagaagcctttaccgggagaaaaaccaaacaacggatttatttgaaactatcgcggtaggttttggggatgaaggcggacgcaatgacaaactagcgaagtttgtaggcggtttacttttccgggccgtggatgaagaatatgttttaaaacttgcagaaatcgcaaacggaaacagtataaaccctttacctgatattgaggtaaggcggacggttgaaagtatgatcaagaaagatagaagggggtgagagagattggtaatgtaataagcatagacaaaaaccctaaattagttttaacggctagcggggatataaaaagcacaagcccggctaatgtggtaatgtctttaaaagcagatgaacagctagggcaatatctaaggcgaaatgatttctcccaagaatatgaacttacgcaagaaatccggttaggaaataccacgttccaagctggggaattgcccgctagttttataagcgtccttacagtgtactttgaaaataatttaggggttgtttattcaccaaacgccatgaaagccggtcttgaaactttcttttcggaacgttcttacaatccggtaatggaatacatggagcgcgtggccaaagaatgggacggccgggaacggatcgggaaaatgtttcagcactatctaggcgctgaagacacacccttaatttccaaaatagcggaaatgtggctagtcggagccgtggccaaagtctatgaaccctttaccaagtttgattacgttttagacttggtaggcggtcagggcgtgggtaaaacgtccctacttcaaaaaatcggtggcccttggtacaccgacgccgtgaccgacttcaacaataaagataattttgacattatgttaaaatccctaatcgtcaatgacgacgaaatggtagcaagtaaccggatgtctttcgctgaaaccaaagcttttatttcaaaaactagcttacgttaccggcgtccttatatgtcaaagacggaagaatttgccaaaaactttattttggcccggaccacaaaccaaagggagtatttgaaggacaaaaccggtgagcgtcgctttctccccgtgctggtggatggttctaaacaaaaaaaacaccctatggagattgaacaaaataccatagatcaaatttggggggaagctgtttcaatcttcaaagaaggctttgaattgaaatttgacgcggaaacggaagcagaacttgaaacgtaccgggaaacattcatgtatagagatgaagttgaaattcaggtaatggattatcttgaaatgcctattccctcacattgggaacgtatgccggcacaaaggcaacgccaatacacggcgtcttggttcgataattcttcagaagttgaatttgggacggaagaactcaaaagagtttcaacccgtgaaattatgtacaacttattcatgaaaaattcgaatgatcggaagctttccgcaaagatcaatttaattattgatcacctcccgaattgggagaaaaaagcttataaagcaaacggaaaaactataaaaggttttgtcaaaattaactaaaatattataactttgtgaaaaaaatttacggtaaccgatcggtaacctacggtaactttcggtaacttttggggtggagatcggtaactttttgggagatcggtaaccttacggtaaccgtgaaaacccttggtattactgactttattagtactaattatataaaagttaccgagttaccgtattttataaaaaaagtataaaaatatttataaataataagaaagcctattatatcaacgtttgtaaaaaataaaattaaaaaagttttaaaaatacggtaacccggtaacccggaaaatttcacaaactttttgaaaggataaatatggaaaaagaaaagagttttgagcaagttttgactgaacttgtggagaaagatttgattaatgagccggaccactataagggtaaaaacggaatggaagtgatcgacgtgatcaaaaattttgcaccttgcccggaatatgctgaagggttctttttcgggaatgtcgttaagtatgttttacgacattcaaaaaagaatggtttggaagatctaaaaaaagctcaaaaatatttgggttggttaattgagtatttggagcaggggaagaatgaaacgggaattaattgaagatagtattcagaaatatcaagatttactagatgatgaagaacattttcaacggttaagaaatttcttccctagaacggcgatccagcaacggaaagaatggatcagaaaaagaattaaaactttaaaagaggattaaaaaaatgcggatgagtaaaaaaatgagtgaccttgtatttagtacaaagatgtggtttatcgcccgtggtatcgaacaaggggacgtaaataagcaaggcttgaaattgattgaagaaatgggggagctggtttcaggctaccttaaaaacaaagaagacgttattaaggattcaatcggcgatgtagctgtagtagtggttggttatgccatgatggccggcgtcaatccggagtttatcttctttgaccgcaaagaagattacttaccagactttggcggggttcaggcttggatttggatgatggcagatagtgcctttcaggcaaaagtagcgcaagatctaggaattgaaaacacaattaaatacaacctttcaaatattattctttacttggatttgatttgtaaggaattaggttatgattttgtggaatgttttgaactggcctatgaagaaatcaaagacagaaaagggcgctgggttaatggtagttttgtgaaagagcaggatttggaagatgaataaacaagaattaattaaaaaatatgtatatatgaaacgtaatcttgaaatgtgggtaactattcctgatatcttgaaagatctgaagcaactagacgaaccacagaaagtaaaaattcctaaatttgtcgcggaacgtattgaatacgcacaggcaagtgattgggacctagaagatgtttttctaaatatagctaatgagctagatacttctgagatttccgaatggttttacacacaagggaacatggatgttatcgcccgcgcttggttggatgggtatgaaatcgaacaggaaaagcggtacgcgattagatttaaaaatattcgcaaagaaacaaactacctaaaatatgatagggttgttaaaaattggtatcttggagccaaagaattttccaaagaaagaaaaacataccacacgaaaaaagaattagaaagttccggctttgattgggtgtttaattgtccgggaattgaagtaaaggagtggaaagaatgaatcaaaaatttagagcatgggacaagaccgacaaaaaaatgtatgaagtggaagagatccattggtattgtggtgattttgattttatcggagatggtgttacttttcaacgtttatcagaaaaagtggaacttatgctttcaacaaacacggtagataaaaacagtgatgaaatctttgaaggggatgttcttcagattgatttcattaaagctattgtacgctttgggcaataccgctactatgacaacaccggcaaggatgttttaacaggtaacggcttctaccttgaatgtttgaatgtcatggatccggattgtatttcaccttatgaaacggatgtacttgataaagctgaaattatcgggaacatttacgaaaatcctgaatatgatcagaattttgtaggcttccgaatcaagggggaataaaaatggcgcttgtatttttgagtttttcaacaaatgatcaagctggaaatggcaaaattatcaatactaataatattgaatctgtttttaaattaggggacatgagtaaccctaaatttaaaatctttcttatgaatgatgaagtagttgattttaaccaaatttactataacggtgattttgtaaacgtctatacaatggatcaagtttatagccttttaacaaaattagaacgtggggaaattcaagatggatcttcataatttcttatgcttgctatttattcttgtgtgggcgctgggcctttcatgggcttgtatcgtagcttttagggcgaatagaaaggggaaagatgaagaataaagaaaatatcctttttatcctattcttcccatgggcctttatggtccttatggctacttggtcagtggtccaacttgaaggtaaaattaaaaggcttgaaaaccagcctaaaacgatcatttacaaggttgataatgccgggggtataattgaccaagccgggaaaataagcgctaaaaacgtccttgagggacgttatacagtgactataaaaggttatgggaatttcctagtgactaaggaacaatatgacagtctgaaagtaggggatccgatacctgattatctaaaaataagggggaattaaaacaaaatggaattagatgaattaattaaaaaatatgaatcttggaaaactcacgctagtgatgaaattgaattggcttacgttactctttttcttgcggatattaaaagcctgaaaaagagctgtactgtggaattaactgtaaatcgtgaaggggttcaattactatgagcaactttacagatttctttgaagaatatgaccgcttgcgctttgaataccgttctacggaagatttccttaatttcctaggggtggaaaatccagctactttggcgtgtaggctaaatgcttacaaaaggaacaagctagttccgcccccttccgtgcttcaactctttgaattagtcatggatccggttttaattacaaattgcatggctgattatcttaatgaaaatgaaacgcaaaattgtgggaaattcgatgatatggctatggaatacattgacaaataccgtaaggcagaaactaaaatagtcaaagatcgaagaaaggcccggaaagaagcctatagaaaccttattaaagaaaggtgcttactgcttggagtttaatttttacgcccgcaagttgtaaaaggcttccgggtggttagtgtatcgaagaatttattaagaaagggggttgaaaactcctataaaaatataaatctatctgggcgtctgatacacgcgcccaaaataaaaaaagccggcgtactgcaaaaccgactttctctcacgaaacaaaaaatatattaaataaggagtattcttattatatcatttttcaaaaggagttacggggtttgagtatcaaggcacaggaattacttgatgaattgcaaaaattagacattgacataaaaagccgaatggatgaaattaatgaactagaagccgggctactatcaagccctaaatttcaagcggataaagtttcaggcggtaagggccggaaggttgatgatgtctatacacagttgattgtgatgaaggaagctatagaacaagatacagccgaaattattgacagaaaactagaacttggtagaatgatcaataaattaaaagaccctaagcaaaggaccgtactaaggcttacttacatagtcaagaaacacgttttggatatctgcaacgatttggacggtatttcactacctacttactaccgtttgaagcggtctgctattagtgaattagagaaagtcttgaatgataacaaatgacattcactgttaaggcacgatttagacaatgtgttacaatggtatttgtcaagtaatggggataaaacaaaggcgttttatcctttttttattgtattttatcagaaaggagccaaaagaatttgggaatgacggaaaggcaaaagatttttgcggatcattatatcatttcattaaacgctacggaagcttattttaaagcttatccgaaaactaagaatgaaagatcagcacaagcgaatgggagccggttgctatcaaatgataaggtaaaagcctatatagatgaacagcttgaaaaactgaagtccgaacgtatcgcagatcaacaagaagtgctagaatttcttacttctgttatgcgtggtgaagtcactgaaccgcttttggttctagatggtgaaggatatcaaagaatcgtggaagcaaaaccatcagtagcaactaggcgggcttcagcggttgaccttggtaagcgttacggcttatttgtggacaggcaagaaatcactcaacgggtggtagaaattgagctgggaagctgggatgatgaagaaaccacagattaagataaaaatcaaaaaccccagccgtgttttcaataagcatatatacgaccacttaaccgactatgacactttcacagaaatacactacggcggtgcttctagcgggaaaagtcatggagtaattcaaaaagtagtattcaagagccttcagccttggaagcacccaaggaaggttctttttttgcgtaaagttggatcaagtgtttatgattcaatctttgaagacgtcaaacaatgcttggaaacgtggggtctgcttggtgcttgtaaggttaataattccgcttaccggatagagttaccaaacggcgcccaatttattttcaaagggttagataacccggaaaagatcaagtcaattaaggggatttcagatgtaatcatggaagaagcttccgaatttactttggacgattacacacaattaaccctacggttacgggataagaaacaccctaagaagcagatctatttgatgtttaacccggtatctaaggttaattgggtatataatgccttctttgttaagaagcctaaaaataccgttatctatcaaacgacatatagggataacaggtttcttgatgatctcacaaaggaaaacattgaggaactagctaacaggaatgaagcctattacaagatttacgcgctgggcgagttcgcaacgctggacaagcttgtatttccgaaatataagaagcaactcttaaacaaggaagaattaaaacaattcccgtcttattttggtcttgactatggtttcataaatgacccgtcggcctttatgcatattaagatagatgatgaaaatagacgcttgtacattgtggaagaatatgtaagaaagggcctgactaatgacaagatagcggaagcaattaaagcccttggatatgctaaagagattattagggccgatagtgctgagaagaaatctaatcaggaactaagaaacctagacattccacgggtgattgatgtactaaaaggccccggctcagttatgcaaggaatccaatacattctacaatatgaaattatcgtggatgaaagatgtgtaaagaccattgaggaattagagaattacacttggaagaaagaccgggcaactaatgaatacattaatgaaccggtggacagctataaccactgtttagacgctatgcgctacgcaattcaagatagaattttccaagctaagaaagaattagacgttaataagacgatttcaaaagtaaatcgcttgtttagaaggtaggtagaaaatggatcatgtaaatgaatttgaacacggtttagatattgaagtaggaagtagaagcgattctttacgctttgacagtatttcaaatgaaccgtttagatattcttctagtgaagcactactagaaaccccggaagggaagaaagctttgaaggatatgttaggcgtgttctttgacagtcagaaaaagcgcttgcgtattttggcttcatacgctaaaggggaaaaccatagtattttatacggtaagcgccggctggataaagaaaaagctgattaccgggtaaggcaccgctggggtggttatatttccagctttgctacttcttatgttatcggtaaccccgtaaccgtgggagtgctggaaggtgggaacaaagaccagcttcaatcaatcaaagaaattgaatggaataatgatattaacgccctgaataatgacctagcctttgacgcttcggtctatggccgggcctatgaatatcacttccgggaccgggataatatggatcgggttgtcttgatcagtccccttgaaatgtttgttattcgtgatttaacggtagaacaaaacataatcggggcggttcaccttccaatctataacggaatggtaaacatgacggtgtacaccaaagatcaggtaatcacctataaaccttttgtccattattcacctagccttaaagtggatgaaatcaccaaacacaactataacgatattccggtagttgagtggtggaataatcgctatagaatgggtgactatgaaagtgagatctccctgatagacgcttacgacgctagcgaatcagacacagcgaactacatgagtgatctaaatgacgccatgttattgatcaagggggacttggaagctatcggggcaacggctgacaatgtggccaagatgaaggatgcaaatacgctactacttcaaacaggtatcagcgcaacaggtcagcaaacgacagcggacgccggatatatttataaacaatacgacgtaagcggaacggaagcttataagaaccgtttggcgaatgatattcaccgctttagtcgtattcctaatttagatgatgatcgcttcaattccacacagtccggaattgccttactttataagatgatcgggctggaacaggtacgcaaagacaaagaaacatactttactaaggctttgcgccgtcgctatgaattgatcagtaacattcataaggccgtgaatggtccggtaatcgaagcgaataaactgacatttacttttcaccctaacattccgcaagatgtatggacggaaatcaaggcttacattgaagcgggtggggaagtatcacaagaaaccctacttaataacgcaagctttaccgattatgaaacggaaattgaccggatcaagaaagaggaaggcgcaagcgattttgaaagagcaaaaagcgtaggtgtggcagatgaatctgaagatagcggacaataggagatacaacgccgaacgcaaggcccaaaccgctttaatgaaaagggatttggagcgtgaaagaatcttggttgaaatctatcaggaatcttatgaacgccttcaggcccaaatagatcgcttttatatcaattatgcgggccgtgagggtttaaccaaacaggaagccatgaaacgggctgacagaatggacgttactaagttcaaccgtaaagcttataaagccgtaaaagaaaaagatttcagcccagctactaatgaatggttaagagtttacaacttgaagatgaaagtaagccggctggaactcttaaaagctgaattagacttggaaatacaaaaccttacagcggaaacctatgaaatgtttgataaggcccgtagaagcgaaatactaagcgaatttgagcgccaagcggggattttgggtaattcatccaagggagtgaaaaagcgcctagaagcgattttagacgctgatttttacggtgaatctttttctaaccgtgtttggggaaagacaggcttacagcaaaccctacaaaaagatgttttcgcttctttgaaccgtatttatacggatatgatggggtataaacaagaacgggaccgactagccaagaaatacggcgctagccggtcaagtgctgaaaggttgatcaagacagaaatagcccgaattaacgcagacacacaaaaagaaatgctggtagctaatgagtttacacattttatttttgtagccgaaccgggagcgtgtgagatatgcgcccctttggatggcaaggccttcccggtggatgaacttgaaaagggcgtgaatatgtaccctatgcaccctaattgtaggtgctcaggctatggacatatcgaactaaaatacaaaaaaggtggtagcaccttaaacgattttaaactaaatgaagaagataaacaatgaaagtaaaagagcttgctgaatttgtagaagaaggaacttattttaacgtaacacacggcgaaaaatggctggatggtgattatccggtagattttttggaatgtgaattagaaataaaaaatatttttgtttcttcatgttcaactatgattgttgaaacctaaaagaagatgaaatttagaatttcaccttcttttttctttgtccaaaccgtgctgaagacgttaaaagttgcatgagttcgggggggttgcccgtaaaagcgtagaaaggagcctactaatggcagaagatcaaaatacacaggttgttgaaccacaatcaccggaaacagttgaggaacaagctagcactccgacacaggaaccggaaaagatggtatcagtggccgaaatgcaacgccgtttgaaatccttggaagaaaaacattccaaagatacagcggacgcaatttctaaagccttggaaaaatacaaggcagaaagcgaactgaccggcaaggaattggaagaataccgccggaaagaagctgaagcggaaaaacaagctttactagataagatcgccgggttagagaaagaacaaaccaagcgggaattgacagatgaagctattaaaacactttctaaccggaaacttccggtcaatgataaagtgatttcttttgttgttaaagataccgctgaaggtactttacaagctatttcagaccttgaaagtattattagtgaaatcaaggctgaatattcgcaatcggaaccccctaaagtttcatccgaacttaacggggccgaaagcacagataaaggggaaatctttagaagttcccgaatcattaaataaccttaaaggagaaatttaaaatatgacagtacaaacttttaaccctgataaagtcctagtttcagaaaagaaagacggaacttttaccaagaaaatgactgatatcattatgaaggacgtagcagaaaactccgtagtaatgcaacttggtcaatatcatgaaatggacggtttgcaagaaaaaaccgtttatgtccaaaccgacggggtttcagcttattgggtaaatgaaaccgaaaaaatcaagactgataaacctgaagtcgttccagttactcttaaagcccacaaattgggtattatcctagttgcttcccgtgaagcccttaattatacatgggaaaaattctttgaagatatgaaaccgcagatcgtggaagccttctatactaagattgatgaagctggacttttgggccatgaaacgccttttgcaaactcagttgctaagtccgctaaaggttcaagccaagttgtagttggtcctatcaactatgaaaaccttcttaaattggaagacaagctttatgaagctgatatcaaccctaatgcctttgtctctaaaattcaaaaccgttctgctttgcgtgaaagccgtgacggtgacaagaaaacaatctacgacaaagcaactaataccattgacggtattactacggttgatcttaaatcaaaacaatttaagaaaggcgaccttttggccggtgactttaacagcttgatctatggtgtaccttacaacattaacttcaagatttcggaagaaggccaaatttcaaccatgaaaaactcagacggtacacctatcaacctattcgagcaagaaatggtagcgattcgcgttactatggatatcgctgtaatggttactaaggcaaacgcgtttgctaagttgaccgctagcgctgaaaacgtctaatcaattagaaaggggtaaccaatggcctatattgtaacccgaaatattatcgacacaaaagataataaccgcttttatgaagtcggtgacctatacccgcgccctgattttactgtatcaggcgcccgaattgctgaattagtcggtaaaggtgtgattattgctgaaggtaaagcggaagcaccagcaccagcaccgactgaagaagtggcaccggctgaagaagctgaagaaaaaccacttgaaaaattgaaagtggcagaattgaaagagttactaggaaaatcaggcgtagaatatgaagcagacgccaaaaaagcggatctagtagcacttgcccaaactatcgaaggagaatagagcggatggaagcgacccaactagcaaaaatcaaacgtcggttgggtattgatccgactgacaatttagaaaatgatttgttgaccgatctagtggaagatgctgaaagttatttcaaaggcctgacaggcacggcagaaatagctagtaagtataatttcatgatcgaaaatgtggtgtataagctatacggccggaaaggttccgagggtgtaacgtctgaaacggttgatggttattctgttacttatcaggaatgggataacctattcaaaccgtacatggccattcttaataaagattttggcctagacggttcacagcgtgagcgtggaaaggtgtttttcctatgaagacaccgaaccgaattaccttaatttgtggcggacgtaagaaatacaatccggaaacggataagtatgaaacggaagcaagaaagactgtaatagtcccttgcttggtgaataaagtcactcaatcaaaagtgtttgaattgtacgggaaccggacagatacagtgatttcttgccggtttcagaaagagcaagcgccttttgatcaggctgtttttaatggcgatacctatgaacctattgaagcgattgacgcccttataaaaggggctgtacgcttgaaaaaggtaggccctaacaatggttagtgttaaatggcacggcttggaaaagctgacaatgacgatttcaaacgctcacccaaacgctgttaaactctctatagccgttttgaaaaacaacggtgaacgtactaaggcagtagcaaaaaagaaagcccctgaagacacgggctttttaaaaaatcatattactacttcttaccccggtatggaagcacatattcacgcacaagccggatattccggatatcaggaatatgggacccggtttcaaccggggacgccattcatgcgcccggcggttcaggaaattcaaccgcaatttcaggaagacatgaccaacgtaatgaaaggggtgttcaaatgacgccaaaccatgaattatttagattaatttatcagttggctgaagcaaaagcaccaacttttgattttttaccggaagctgggacaaagtacccctttatttacataggcgaaaatacggcacaggaagcccaaaataacgacctttgggggacagtgggccaaacggtccacatttacgctacaaggcaacagcgggccattttggacgatatttcggcctatttagaaacgcttgtcaaaaatatttctgggaagtgggaatataacttaaatcacactacgacagataaacagatcataccagataatacagacgtccagccattgcttcatgtggtcttggacttttcttttacctatacaaagaaggagaaaaaataacaaatggcagaattaattcaagggaaagactttatcgcgtttttccgacgtgttaaagatcaaaagaaacaagacgccggaaaagtaagatttcaaacggaattaactttgaacgctgaaaaagaagttgaaaccacaaaaaccaaggatggagttgtgaactcagtttcagacggtgaaacttcaggcgaatttacttcactcgcttaccgtgaagataaagacacggtcaatatgtggaaagaaatgcgtaaatggttccgtaatacggataaaattgaagtttggattgtggacctagcaagtaaatttgaagacagcggaaaggaaaaatatgatgtggaatactaccaaggattcttcaaaaactttgaaatttccgcgcccgctgatgataaagtagaacttacttatgaaatggctattgatggaaatggtgtgatcagtactgacacgcttacagaaacccaaaaatcagccattaacaaggcgcaatatgaataccacactttggctaaagagggcgaaggtacagggttaccagcctaatttttcaggggctttaaaagccccttatttttttggatttaaaggagaaaaaagacatgattttaaacattggcggaaaagaatatactttacatttcggaattggtttcttgcgtgaaatgaataagctccattcagcggaattggaaggaatgaaaaccggttacggtgctatgacactattcaacgctgggaaagccttaaatgaccccttggcgtttattgatgtgatcaaagccgggacagtaacggaagcacaaaagccgtcaaacgaagctattgaaaaataccttgaagaactgattctaaatgatcagtatgacaaagttattgaagacttggttaatgagttaaaagcgtcgcccctactcaaaaaggcaatgaacctagtagagtagggaactccgaacagtcaagttctaattttggctatgatgaagccctagcgctccttattgcccggcacggtatgaccttccgggaagcaatgcggaccacgctagaagaatttgaaatttataatatggcctacgctattcagcaagaagataagcgcctaaactccgctattcaggcttggtttaatcaatctgttaaagcgcaaaaaggccggggcaagtcagcccgtccagcgtttaagaattttgaagaattttataaccataaagaagaatttgacaggattttccaaaaaaatcaacctacaaaagaaaccgtaccgcctagaaaattagatatggcggaacgaaacagattaataaatcaagcagggaaagggggtaattaatgggagcagattttgacgtaacggccatactgaaggcgaacgtttcagactttagaagcggtttaaaagaagcccaaagttctttggagagcttgcggaatcaaaccgggtcaagtcttgaaaaattaagcgggacacttcacggcgtcggtgattccatgatcaaggtaggggccggaatgacagccggtttcacattgccggtagttggtgctatcggtggagttgtcaagtcgtttgcaagcctagaacaggccataggtggtattgaaaccatgtttaagggttccgctgatactgttatcaaaaattcagaaacagcatacaagcgggccggtgtttccggtgtgaaatacatggagcaagtaacgtcattcagtgctagcttgcttcaggggcttggtggtgataccgcacaggccgccaaatatgcggatatggccatagttgatatgtccgataatgcgaacaagttcggtactaacatttcagacattcaaaatgcttaccaaggttttgcaaaagataactataccatgcttgataacttgaaacttggttatggtggtacgcaagaagaaatggcccggctggttaatgaatccggcgtaatgggtgacagcttcaaggctacggccaaaaacgtgaaagacattccgtttgataaactgatccaagctatccacgttacacaagaacggctaggagtaaccggaacaacagcgaaagaagcaagtgaaacagtatcaggatcctttgaagctatgaaagcttcagcccaaaaccttgtagccggccttggtcagaaaaacgctgatataaaaggcctaatgcaaaacctaaaagatacaattatcaacttcaagaataacattgtacgggttttaggcacaatttgggataacttaccactatcaccacttcaaaagtgggtgggagcctttaccgtggcaatcgggcctattctaacagtagtaggaacggttactaaggtagtagggaccattgtaggggtagttagtaaagtttcaggcgctatttctagcctgatcgctggtttccaaagtgctaccgctgggggttcagctatttccggcgtgtttggttcaattggtaccgctataggttccatttccgccccggtttgggctgtaattggtcttattgggctatttgtggccggtttagtgggcttgtataagtctagtgaggaatttagggacaaggttaattcagcttttcaagctgtttctaaggctgtttcaagcgctattaatgaattagtggcctttgtaaaacagatttttggaagtcttatttcttggtggaatgaaaatcaccagcttattcttcaaacggctgaaaatgtatggaacgctattaagtcagtagtagaaacgattgtaaacgccattgccccaattattgaagccggttggaacgcaatagttccaatggtcaaaaccgtttgggacctaattaaaaacgtagttgaaaccggtttaaatgtaattcttggaattattaaaacgatcatgcagatcattaatggcgattggtccggggcgtgggaaacgctcaaaggggtggccttgagtatttgggaaggtatcaaaacggcggtaggaatcgctattcagggccttactcaagttattcaagccgggcttgaactattgaaccaaatttggacagctatttggaatactattgtagcggttgttggtcctatttgggacatgattgtaaatttagttacaacagcaattacagcggtttggaacgttattcaaacaatcctaaccactatctcagatatttggaatacgatttggaacactctttcaacagtagtttcaacagtttggaacgccatttctcaaacagttacaacagtctttacaactatttggaataccattcaaaccattctcaacactatcgcagaaatttggtcaaatatttgggaaagtattaaggcggtgtttgcgaccattctattgactattgtagggcttgttacaggtaattttgacttgatcaaacaagcaattacaaacgcttggaatatcattgttcaaagtacacaagcaatctggaatactattgtttccttcttgggatcaatttggaatggtattacttcaacagctacggcgatttggaacggaataagttcgcttatctcaaatgtgatgaacgctatcttttcaactatttcaagtatttggaatagtataagttcattcatttccggaattttaagcggtatttcttcaaccgtttcaagtatttggagtggtataacttcttctattagtagtttcatgtctaatatcggaagcactatttccaacggctggaatactgtagtaagtaccgttactagcgcgggttcccgtttagtttccgcagttaaaacagcctttacaaacgccgttaacggcgctaaaaacttcattagtggagcgattgacgtcggtaaggatttgatcctaggatttgttaaaggtgtaaccgggttcgctggaaaacttattgacgccgtgggcggtgctgttaaaggcgccattaattgggccaaaggtttgctaggtattaaatcaccttcacgggtattccgtcaattcggggtatacactgaccaaggttttattattggggtagacagtaaggccgaacaagtagcgaagtcagtaggaaacatggcgcaaggcgctattaatgcctttactgataaggacctatcaggaactttccaagatgaattgagttcagtagatggagcgctaggaagccttaccgcttatgatccaaacgttaactttgaaggtggtagcctgacagtcggacaacagccggcagatattaccttaaaacttggtaatacggcttatagagccttcacaaacgatattacaaatgagcaagaaatggaattgattttagatagttactaggaaggggaaaaagtatgtacaattacgctaatctgaagaaattagatcaagccgttacagttttggaacctagcgacaatctaattattaacggtcagcccctcaataatttaattgaggggtaccgccatttaacagtttcaggccgtggcctattgggccggaatgtttcaactaccaaggttacaggccggcgcggtgtttgggtggatgattatgaggatgaagaacgcaccctagaaatcaaataccagcttacagcggacaccagcgcacaaatgcgggacaagttcgctaaactaaataaaattttaaggacacacgccccaagcggtttccttgaaatttcgttccgggatgaaccggaatacatatactatggttatttcaacggggcagatagctttgaagaaacaaacctaagtatagttagtaagtttagtttactaattccggatggatataagaagaaacagccccaaacttcaacagggcctatttcccttattgacgccgtggaagtcttgccggaatcaatcacagtcacaccgtcaaaaaccactgaccgggtgcagattgtgaatggatctaaaattatttctttttcggggagctatgcacccggtcaagatattgtaatttcttttgatccggatgaagtccgggcaacttacgggggccggaatattttgagtgaattagaccgattcagtccgctggaattgtttaaaattcgggacggcgacacgataacggcagttaatgcgacagtgaagaaagtagtttggagggatgaaagagcgtgatttatttatttgataatgaagaacgacttttaaaagtcgtaagaagaaacgctatcaagtcagcacttcaaaaatacgcgcttactactgataactacgtttctgatcgtttgacggttgaaatgaaggcgttaaatgatgatgaatttgaaaaggtggagtatatggccattcaatcaatggaaaatacacacctttttcattatttctatattgcccaaaaatcaaccaaaggggaaatttctacttttaccggtgttcaatccggtatagaagaattgagaaaaaccccggtatttgataaacgccctaaaaatacaccggctaaaccggtgattaatgaactcttacagggtacgaattggcaagcccgttttattgctgataccacaaaccacagtaccaatttctactatacttcagtttttgacgccctgaaaaaaatctgtaaggtttggggcttggaaatgcagttctttgttgaaatgaacagcaacggcctaggcgcccggtacattgatttcaaaaagaaaattggtgaagccgtagggaaacgggtagtctatggccataatgcgctagagatcctgaaggaagtagaaagaaccaacattttcacggccttaatcgggcgcggtaaaggtgaacaggtttcaagcgctgaagaaagcggaaaaggtggggacggttacggccgaaaaattacctttgaagatgtggtatggtccaaagctaaaggggatccgctggataagccaaagggccaaaaatacctagaaattccggaaatgactagggtttacgggatcaaaaattcaaacggcacaatgcgccctaagattggatttacggaatttagtgaggaagaagacccgaacgaattgatcaagctaacttaccaaaccttgattaattcagcacgtccacaattaaccttgaaaacgtcaagcgtttatctaagaggggttaaaatcggggacactatccgagttgtccgacatgataagaaactagactatgatacacggatttttgaaattactttcaaccgtttaaatgatcagtctagtgatatcaaattaggggatcagatcggtgaaagttcatcttccaaggttcaggcggtggcagataaagcggtagaagaatttatcaataatgaatttaatagctttattgaaaacttaccggattttatcaagacggcagacggctttaacacaaattggtacggtgctgaagaccctacaaaaaaataccctaaaaaagtattgatcaacgatatttggtacaaaccggacccggaacatgaaggccataaaatcatgctacgctggaccggggaagtttgggaagaaattctaaggacttacaatgaagttagtctaagggaaaaaattgatcagaaattcaatgagctgaaacaggctatggaccagcaaagcgccaaaactgaacaacagattaatgacgctttgagtaaatccggacttggtaaacttgcggacgacgcaaaaaagatcgctgaacaggcaaaaggcgaacttgaaacaatcaaacagcaaaaccaaacagccaaaaatgaactaactacttttaaagagaaggttcaggctgatttggacggcaaaccaagcaaagcggaagtaactgaattgattgacggggtgaaggagaaattcactactaatatcggtttgagaaactacgttttaggcacagggaagccggcagacgtcgggaataataccaaactttacacgttttcaaaagattcccacggctggggaactgatcaaaagctaagactttcttttgattatcaggcggaagacgctgtaaagaaattccgtattaatcgggtagttagatacaaaaacggtcaggcacagtgggattttgcaataaacaaccttacaacggggaaagctttcattgatgtttctagcgaaaaatccgggaagtattcggagccgtttatttggaaaggttacaccaaggggaaccctgaagatattgaaagtattgagttttatttaaaccttgatgaaggcagtggtaacgtacagattaaaaatttgattgtttccgctggaactaatgaaactgattgggtacccgccccggaagaccaagaatatttggtaacacaggcacaagctgaatttgaaagaacaacgcaaggcctgaagactaaattagacacgatttctacaaacttcaacccggacgggacaacttcagaaaaatttaaccgctttttggaaactaaaactgctgaaggtatcagccgggagcgcgctgaatttggaaaaaactacgtcgctaaaaatacttataacgaaaaaatcaatgagattgaacagaagtttaatcaaacggatggacaattaacacagtttgcgacttataagaacgggctagatggtcagtatgcgacaattaccaaagaactttcagacaataagcgggcttatagtgattttgtccggacgtcggatgtatttgtacaggcctttggtaccgtggggagtgaaatagctagcaatatttcccggatggttttgaatgatcaaatttttcaaacggaagtaggaaaatattcgtcaaacggcgggccaaatatgctcaaaaattcccgcgcagatgatggtttgaaatattggacagaaccaaatggacgaatgaactttacacctcatcagttctatttcaacgggcaaaagcggatgttctccctaaggcctgacgcagtcgtgaaaagtccgcgctttatcgttaaacgtggcgccaactatatgttaaatatgcttggttttgacgctaattcaagaagttttaagatctatttttgtaagcgtaaaaaaggaagtacagcggactttgaagaaaaacaagtcatttttgaggggtccggtagtcctatttttaacagtaacaaagctgttaagaaatcctttaaatttaatgtaggcgagtttgatgatggttacttacaatttgagtatttaagaaatgacccgaaccggtggggcggtctttttatgaccgaacttgatttttatgaaggttccgcggatcgcttatggcaaccgtcgccggacgattcaaatgaaccaatagaagcagttcggacgcaagtaacacagctaaataatagctggtcagtccggaacctaaacagcgccggggacgtgctggggcaattaaatttgaacccggacggctcaataaaaattaatgaaggtttgctttcaatcggagaaaaaacctatattaaagatggtgttattaaaaaatcaatgattggtaacgcccaaattgacacggcacacattaaggaaattgacgcttcacaagctaacattttcaatctgaatgtcaataatatcaacggtttaaacgctgaatttattaaggcaaagattgaatatgccttggtggattggatgaagggcaagaaaatttcagccgtgaatgataagacggtaatagatttgaatgaaggtgcgattaatcttttttcaaataccgggaccattcgccggattgatgatacaagttcttcacaattcttaaaaatgacccgtagcggttttattgctgatcatttccgggatcctaattctgctatgatcgtattaggtactaaccacgataaaacagaaaatacaaataatgcaacctttgccgggacccgcctttggtcaggctcaggaaatggtgttaatgaatcgttttatgaattagtggctgatcggattgctatctattcaaacggaaagtatcgcagtccttggctaatacataataacaccgaagacggaaacaccttcttaattccaatgaatgaaaacggcgttaaacataatttaggccgtggggataagcattttagcaaagcttatatagatgatctatttattgggaaaggatcacaaaacgtaggaggctatctatgggatatcctgacttgttttggtattatcgcccgttatggttgggatctaaaaaatggagctgttcaaaatcatataaaatccaatctcatcaataaatatggctttaaatagaaaggaaaatcaatgaacgaagatttttataatggtgtatattctgaactagcttcagaaattggacaaaaagcggtaattattgcgacgtttcaaacgcaagtaaagaattaccaaggttacactcaaaagctggaagaagagaaacaagaccttcagaaagctaaagatgaattacaagcagattttgaagcccttcaaaaagaaaaagaagaacttcaaaaccaactcaatgaattaaaagtagaaggagctgaataatgcggacttatgcagtagtagggaaatacccggtatatgatgaagacggaaaaatcacacacacagacatttctttaaatgcaactagtgggggctttgatagcttcacccagcgagtggccggggatcaccggaacaagccggacactgaagcgattgaacttgctaaagacgcttattttaaatcagaatacgctgaaaaggccatgtctgaaagcgttcaggaaattgataacttgaaagtcaaagctaaggagcgagatttaaaagtacaggcgcagaaagaacagcttgaaaccattaataaattagtggaaaacaacgctaaattgacacacgtttcaattttaaatgctgtaatgtccaaaaatatcacttatggaacaatctataaacagtatatggaccttttgcctattgctaaaaccggcgatactttccaaacagatgatttatttgtattggaagatcctagccatgaagaagtggacggggaaggaattaagattttaattcaggcccaaaaagcttttacctataatggcgaaccaatcagcgaatttatgaaaggtggcaagctggaactaggaacagcaacagcatggccttttgttggaaaggaataagggtgacttgtggaagtaattgaaccggatggaatttttggaatttttgaggtggttagggacttctacgcccacgggattgatgagcattttatagtttttgctttaatgttaatcgttgcccttgatatcgttttaggagtatcaagggcgtgggcttaccatgacttttccagccgtaaatggcggaaaggtttagtcagccacacggccatgatcctaataacggcgattgggtacccgttcgccttatacatgaatttagcgcccgtggtggacgcttttattatggccataatggcggcttacggatctagtattctagctagtttgtcagcgctgggcgtagaaattccgggccttgatcattttgttaaacaaaacattgatcgtgaaaagtttcaactcaaagaagggctagaagaacctagcaagttaatcaaaaagacaaaggagaaaaagaaatgaatcaaattactgatattgttgtaagcggggctatgagtattcttgtagtgttagtagggattgtggttaattctgttaaacagtaccttcttacccgtggcggtaagaaagcacttgaaaccgctgaaatcctagctaaaaacgccgtacaggctaccgaacaagtagctgataagttggacatccacggcgctgacaagttagaacacgctaaaacaagccttattgaaggccttgaagcctataacatttatttaactaatgatcagttaaatacatttattgaatcggctgtaaaaacagctaatgacgcttggaagaaataacaggggctttaaaaatggataaaattcaactatttcaaaatgaggtgctgggctacggctttgatattgatggatcttacgggtggcaatgctgggacggttacgcaaaatattgtatttggctaggcgttccctttgcaaactgtaccaattccggctatgtgaaagatatttgggaacagcgttataataacggtattcttgattattttgatgaagtagaaaagcttgaaggcagtgaagtttgtatctttacggaaaacgaatggaccccggtttctcacgtcgctatctttgtaagtgacattgacggaaaccaaggctggttccttggtcaaaaccaaggcggtgaagctgggccaaatggtggtggtgctttcaatcttatggccttcccttattcaactctttaccctacagccttccgacctaaaggcgaaccacttccaaaagaagaactcaaagagatcgttacggaagtcatggaaagccatgaagtaccattcttccctgaagaagctactttcacggtgggagatagccctatcaatgtccgccgttatccggatttaaccggtgaaattgtggcgacttatcagccgggtgaaaaggttcattacgattccaaaggtaccaatgcaggttatcgctggatctcttacgtgggaacttccggaaaccgcaactatatggctattggtcccgtggatgaagccggcaaccgtacagatttatggggtatgctggaatgacgggaactaattctacaaatttaaaccaaaccaagggcggggaagtcattaaacaaggtgactttggttcaacctttgaatttgaattacttgattatgccggaaagcctattgaagccctagacgggcaaaatgcaaaagtaaaactagctgggtcaaaaggtaaactagtatttgaaaccacagtagaaggctcaaaagtgagttttaagatcctgaagatcttaccggtgggagtttatcaattagaaattgaatccggggactatgttttccgagtgatcaaagcgccaaaattgacgttattcagtcggttgaaaattatcaagcgcctgaagtagtggagcttggaaaagtcaatattcaacacgaaatttctgaatacttgaacattcaccccttggatatttctgaaaccgttaaacggtattttgaaaatcaccctattcagccttacaatgatagcgccctagtccggcgaattgaagcgctggaagctagaccggccgggcaagcggtggatctaagtacctacctaacttcagattttgcttatcaaacttttgtcaactatacggcgcttcaaagccaaatgacggaaatcattaagaacaaacatttagaactaggcttggacgccttaatagataccaagctagcgaatggcggggatccgtttcaaactttgagcaaggcaaaggaaacctttgctacaaaggaagaattaacaagtttaatctcccggatcgaagccctagaaaataaaaaccaataacggttaaccccttccaaatggaaggggctttttttgttgccgttataacggaattttttaagaatgtctattagaatagacaataaaaaaagaactgttttcagttcgcttttttaactatacgggcaagaaaattgaatacggttttgaatacggtttttataaactattggaaattaatagataactattaaaatcagaaagccttattttataagttttcaagtattaatagaaattaatagaaagcatttttcaaatatgctaaaatagtaccattggaggattaatcgaaatggtaaaacaacgtaatgaaattgatgaaaaataccaatgggatttgtcgacaatttttgcgacagatcaagcttgggaagaagaagcagcaagcttagctgcagatattaaagcagcaagccactatgctggtcatttgttggattcagcgcaaacacttttggatacaaccaatgcatatttggaattgagccgtcgcttagaaaaggtctacgtctatgcccatatgaaaaatgaccaagacacacgagtggctaaataccaagagtaccaatcaaaagggatgtctctttatagcttgttaggtgaaacctttgccttctatgagcctgaattcatggccattacggatgagcaatacaagacctttgtgagtgaagttccagccttggaacaatatggtcattattttgatcgtttgctagagaaaaaagaacatgtcttgtctcaaaaagaagaggaattacttgcaggagctggtgagatctttgcggctgggggtgaaacctttgaaatcttggacaatgcagatattgttttcccaactgtgcatgatgacaagggcgaagaggttcaattaacccatggaaactatatttctttggtagaatcaaaagatcgtgccgttcgtaaagaagcttacgaaggcctctacaaggtttatgaacagtaccaacatacctatgctaaaaccttgcaaaccaatgtgaaagttcacaactttaatgccaaagttcgcaaattctcatctgcccgtgaagcggccctttctgaaaactttgtaccagaaagtgtttatgatagcttggtggcagcggtcaacaaacacttgccactcttgcaacgctatgtgcaattgcgttcaaaaattctaggaatctcagacttgaagatgtacgatatgtatacgccattatccgatacagactacaagtttacctatgaagaatcgttggccaaagcagaagaagtcttggctgttttgggtgaggactacctttctcgtgtgaaacgtgcctttagcgaacggtggattgatgtgcatgtcaaccaaggaaaacgctcaggtgcctattcaggtggttcttatgataccaatgccttcatgttgttgaactggcaagatacattggataatctcttcaccttggtgcatgaaactggtcacagtatgcattctagctatacccgtgaaacccagccttatgtctatggggactattccatcttccttgccgaaatcgcctctacaaccaatgaaaatatcctgaccgaacgtctgttagaagaagtagaagacgatgcaactcgttttgctattttgaatcacttcttggatggcttccgtggaaccgtcttccgtcaaacgcagtttgctgaatttgagcatgccatccataaagcagaccaagaaggtaccgttttgactagtgagttcttgaacaacctttatgcagagctcaatgaaaaatactatggtctttcaaaagaagacaaccctgagatccaatatgaatgggctcggattcctcacttctactataactactatgtcttccaatattcaacaggttttgcagcagcttcagccttagctgaaaagattgttcatggaacacaagaagatcgtgataaatatatcgactacttgaaagctggaaattctgattatccactcaatgtcatccgcaaagcaggtgtggatatggaaaaagaagactacttggacgcagcctttgcggtctttgaacgtcggttgaatgaatttgaagccctagtagaaaaattaggactcgcataagatggtagagtcttatagtaaaaatgccaaccacaatatgcgccggccagtggttaaagacgagatcgttgactttatgcgcacgcgtcaaaaaccggtagcaggtgccttggaggagttagaagcattcgcccgcaaggaaaatattccgattattccgcatgaaacggtagcttactttagactactcctgcaagccctacaaccaaagaaaatcctggaaattgggacagcaattggattttcagcgctcttaatggctgaaaatgctcccgatgcacaaattaccactattgatcggaatgaagagatgattggctttgccaaggaaaatctggctaaatacgatcagagaaaacaaatcaccttgcttgaaggagatgcagtagatgtcttgcaggatttaacagagacctatgactttgtctttatggactctgctaagtctaagtacatcgtctttttgccacgaattctcgaactcttagaggttgggggagtcgtggtattggatgatattttccaaggaggagatgttgccaaggacatcatggaagtgcgtcgtgggcaacgaaccatttaccgggggcttcagaacctctttcatgcgactctcaatcatccagatttgaccgctagtttggtgccacttggagatggtattttgatgattcggaaaaatacagagacggtaaccttgccagatcctagctctttttaggtaaatttaaggtattctctctaatttgtggtaaaatagaagaagtttaaaaaggaacggagaataattttcatgaagaaaaaacttgtagcaggtgctgtgaccttgctatcagtcgtaacactagcagcgtgtgccaatggcacaaacaaagatatcgtgaccatgaaaggggacacgattacagtttctgatttctataatgaaatcaaaaacaaccaaggtgctcaacaagttcttttccaaatgaccatcaataaagtctttgaaaaagaatatggatcaaaagtttctgataaagaagtcgataaagaattggctaaacaaaagaaacaattaggcaagcaattcgatgcttacttggcgcaacaaggcttgacggaagaaacagcaaagaaacaaatccgtagcaatatgttgttggaatatgcagtcaaccaagctgctaagaaagatatcaaagagtctgactacaaggcggcttttgaatcttacacaccagaagtaacagcacaaattatcaagttagattcagaagataaagcaaaagaagtgttggaagcagctaaagcggaaggtgcagactttgcccaaatcgccaaagacaattcaacagatactgctacaaaagacaaaggtggcgaagtcaagtttgattcaggaacagcagatattccatctcaagtcaaagaagctgcctttaagttggatgagaacggcatttcagatgtgatcacagtttcagcaggtcaaaactattctgctagctactatattgtcaaattgaataagaagacagaaaaaggctctgactggaagaaatacgaaaaacgtttgaaagagatcattgttgatggtcgtaagcaagataccaactacatccgtagcattattgcaaaagcgatgaccaatgccaatatcaaggtcaaagatgatgccttcaaatcaacatttaaccaatatttgcaaaatatcggtgttcaaacgagcgatagcagctcatcatctaaaaaatagttgacggttccttttggaacttgtataatgaaatagttgagaataaatcattgttactcggaatcagagaagtggcgggggtgtgagccatggaagagaaatgattttgctactcggctgagacaattgcatataaaatgaagaatgacaagttcattgaatgaaggtggtaccgcggtttttcgcccttcgtttagtggcttgtcttttgtttatgggcagttgtctggagctttttaaaggagatcaaaagatgcgaacctatcaagtgaaacaaaaatttcgattgggtggcgagcgcttcgatatcaaagatgagttgggaaatgttgagtaccaggttgagggatcttttcttaagattcccaagacttttaccatctacgataagaatggacaagaagtgagccatatcactaaaaaaacaatcagctttcttcccaagtttgtggttgagttgaaggatggggaccgcttttttatccataaaaagctgacgctcttcagggataagtacgatatcgaagatttgggacttcgggtacaaggaaatatctgggacctagaattcaaattattcgatgaccgggatcaaatcgtcgctgagattagcaaggaactctttcatttaacctctacctaccaagtatcggtctatgaggatgaatacgctgatttagtcatctcactttgtgtcgccatcgattatgtcgaaatgttagaagctagcgcaaattaatcttaaaaaaattaggagacaaatatgaaacaattatctagtgcacaagtccgccaaatgtggcttgatttctgggcaagcaaaggccactcagtagaaccatctgttagcttggttccagtaaacgatccaacacttttgtggatcaactcaggggttgccactcttaagaaatacttcgatggaaccatcaaacctgaaaacccgcggattactaatgctcaaaaagccatccgtaccaatgatatcgaaaacgtagggaagactgctcgtcaccataccatgtttgaaatgttggggaacttctctattggagattacttccgtgatgaagccattacgtgggcttatgagcttttgacaagtcctgaatggtttgatttccctaaagacaaactttacatgacctattaccctgatgacaaggattcatacaaccgttggatcgctgttggggtggatccaagtcacttgatcccaatcgaagacaacttttgggaaatcggtgcagggccttctggaccagatacagaaatcttctttgaccgtggagaagcttttgacccagaaaacatcggccttcgtctgcttgcagaagatatcgaaaacgaccgttacatcgaaatctggaacattgtcttgtcacaatttaacgctgacccagcagttcctcgtagcgaatacaaggaattgccacacaagaacattgatacgggcgcaggtttggaacgtttggtagccgttatccaaggggcgaagaccaactttgaaacagacctcttcatgccaatcatccgtgaagtagaaaagatgtctggtaaaacctacgatccagatggcgataacatgagcttcaaggtgattgctgaccacatccgttcgctttcatttgcgattggagatggagctcttcctggtaatgaaggacgcggttacgttcttcgtcgtctcctccgtcgtgcttccatgcatggtcaaaaattggggatcgaaggaaccttcttgtataaattggttccaaccgttgggaagatcatggaaagctactacccagaagtacttgaaaaacaagacttcatcgaaaaaatcatcaagagtgaagaagaatcatttgctcgtaccttgaactctggtcaacactttgcccaaaccatcgttgaagacttgaaagctaaaggtcaaacagtgattgctggtcaagatgtctttaaactttatgatacatacggattcccagtagaattgacagaagaaatcgctgaagaagctggaatgacggtcgatcgtgacggttttgaagcggctatgaaggaacaacaagaacgtgcgcgtgcatctgctgtcaaaggtggatctatggggatgcaaaatgaaacccttcaaaacattacagttgaaagtagcttcaactacaatgccagccaattgccttctaagttggtggctatcgtagcagataatgctgaagtagaggctgtttcagaaggaactgcatcactgatctttgcagaaactccattctacgctgaaatgggtggacaagttgcggaccatggtcaaatcttggatgctacaggaaatgtcgtagctactgtaacagatgtacaaaaggcaccaaatggacaaccacttcatacggttgaagttcttgctcctcttgccttgaaccaagaatacaccttggcgatcgataccaatcgtcgtcatcgtgtcatgaagaaccacactgcaactcacttgctccatgccgctcttcacaatatccttggtaaccacgcaacccaagcaggatctctcaacgaagtagaattccttcgctttgactttacccacttccaagccgtaactcctgaagaattgcgcgctattgaacaacaagtcaatgaaaagatttgggaagcgatcgcagtcgaaacgattgaaacagatatagatactgctaaagaaatgggagccatggccctctttggtgaaaaatacggtaaagaagtccgtgttgtcactatcggtgattactcagtagagctttgtggtggtactcacgtaggtaacacttctgaaattggactcttcaagattgtcaaagaagaagggatcggatcaggaactcgtcgtatcttggcagtgactggtaaggaagccttcgaagcttatcgtgaacaagaagatgcactgaaagcagtcgcagcaaccttgaaagcacctcaactcaaagaagtccctcacaaggttgaaggtcttcaagaacaactccgtcaattgcaaaaagaaaatgcagaattgaaggaaaaagcagcagcagcggcagcaggcgatgtcttcaagaatgttcaagaagcaaacggacaccgttatattgccagccaagtttctgtatcagatgcaggtgcccttcgtacctttgcggataactggaaacaaaaagattactctgatgtgcttgttcttgtcgcagccatcggtgacaaggtcaatgtccttgttgccagcaagacaaaagaagtgcatgcaggcaatgtgatcaaagaattggctccaatcgtcgatggacgtggtggtggtaaaccagacatggccatggcaggaggaagcaaccaagcgaagatccaagaattgttggatgccgtagcaggtaaattgtaataataggagaggttggatgtttgttcaacctcttttttcaaaaaagaagcagatccaattagaaaaagattgcaacaaaaaaacctttccgtctggaaaggttttttcttcttataaaccgtaattgtaatcgtcatcctgcatggcttctacttcaccgagaaggtaaccatttccgacttgagagaagaagtcgtggttagaggtaccggttgagattccgttcatgacgattgggttaacgtcatctgctgagtctgggaagagtggatcttgtcccaagttcatgagggctttattagcgttgtagcgaaggaaggtcttgacttcctctgtccagcccacaccgtcatagaggctctctgtgtagccttcttcattttcatagagggtgtagagcagatcgtacatccattctttgagtttttcttgttcttcttctggtaattcgttaaatccaagttggaacttgtagccgatataggttccgtgaacagattcgtcccgaatgatcaacttgatgatctcagctacgttggccaatttgttgtttccaagatagtagagaggtgtgaagaaaccagagtagaagaggaaggtttcaaggaagacgctagcgactttcttttcaagtggagtcccattgaggtagatctcattgataatctctgccttcttttgaaggaaaggattggtattggtccattcgaaaatctcttcaatttctgacttggtattcaaggtagaaaagatagaagagtaagacttagcatggacagattccataaattggatgttgttaaagacagcttcttcgtgtggagtacgaatatccgcacgaagagcttgaacacctgtttcagattgcatggtatctagaagggttaatcccccaaagactttaccaactaggtctttttctttattcgacaactttctccagtcatccaagtcgtttgacaaagggatacgtgtatccaaccagaattgctctgtcagtttttcccaggtcgatttatcgatgacatcttcgatcgcattccagttaatggctttgtagtatgtttccatttgcatcactttctttttctattcattcaatcgttactattctaccataaattgatagaataccgcacaaaaagtcggcgaaccgacttttgatagctatctaggatagcggattagatgacacagctttcacattggttggcgccaacttctccaccatcatctgtaaaggtacggacgtagtagatagacttgatccccttgttaaaggcgtagttccgaaggatagacaagtcacgagtggtttgtttgttttcagttttccattcgtaaagaccctttggaatatcgctacgcataaagagagtcagtgaaagaccttggtctacgtgttcagttgcggcagcatagacatcgatgacttttcgcatatccatgtcgtaggcagaagtgtagtaaggaatcgtttccgttgacaatcctgctgcagggtagtagatcttaccgatttttttctcttggcgttcttcaatccgttgtgtgattgggtggatagaagcagatacgtcattgatgtagctgatagatccatttggtgcgacagccaagcggttttggtggtaaagaccatctgcttgaactttagcacgcagttctgcccaatcctctgcacttgggataaagatatctttaaagagttctttgacgcgatcagattttggtacaaattctccagtcatgtacttatcaaagtatctaccgttggcataatcagatttttcaaaattgtggaaggtaacaccacgttcacgcgcgatgttgtttgattctacgagagtccagtagttcatgagcatgaagtagatacttgtgaactcaacagactcaggggatccgtattcaatcaattgttgcgcaaggtagctgtgaagtcccatagctccaagtccgaacgaatgcgccagtttatttccgtggtcgatagttggaacggccacgatatgagagctatctgtaacgaaggtcaaagcacggaccatggcacgaatcgaacgtccaaaatcaggtgaagtcatcatgttaaccacgttggttgaaccaaggttacatgagacgtcagttcccatttggacaaattcttgggcatcgttgatcaagcttggttcttgaacctggaggatttctgaacacaagttactcatgatgattttcccatcaacagggtttgcccggttagcagtatcgatgttgactacatatggatagccagattcttgttgcaatttagaaatttcagtttccaaatcacgtgccttaatttttgtcttgcggatgtttggattagcaaccaactcatcgtatttttcagtgatgtcgatgtagttgaatggcactccgtattcacgttccacagagtaagggctgaagaggtacatttcttcattcttacgagccaattcatagaatttgtctggtacgacgaccccaagtgagagagtcttaacccgaactttttcatcagcattttctttcttagtagaaaggaaggcgatgatgtctgggtggaagacgttgaggtaaaccacaccagccccttggcgttgtcccaattggttagagtaagagaagctatcttcaaagagtttcataacaggtacgaccccagaagcggctccttcataccctttgattggtgctccagcttcacgaaggttgctgagggaaatcccaaccccaccaccgatacgtgaaagttgaagggcagagttgatggaacgtccgatcgcgttcatatcatcggttacctggatcaagaaacatgaaaccaattctccacggcgggcacgtccagcgtttaagaaagaaggagtcgctggttggtagcgttggtggataatttcgtttgcgatgtctcgcgcgatagcttcatttccatctgcaaaatagagagcattgaagaagacacggtcttccatgctttcaagatagtattctccatcatttgttttcaaagcgtattggttatagaatttgtaggctgccatgaaggacttgaattggaagttttggtctttgataaattgggccaattcctctaaaaattcaggacggtatttctcgataaaagctctctcaatgtaattgtgctcgagaaggtactgaatcttgtctgtaatcgagtcaaaggctttagtatttggtacaacattttctttaaagaacgcatccaaagcttctttatctttatgaagcatgatttggccgtttactggacggttgatttcattgttaagacgaaaatacgtcacatcttcaagagattttaatcccataataatccttttctagttcaaaaaaatgaagaggagaagtcctctctttacaagtaaaaagtctagtgttaggttgctaacgctagaccctatttaagcaaaatactgtgtttattaagaaagtttcttcaacttagctggttgaaaaccagaaaatacttcatccggtgtttgaattactggagcagcattgaagccaaggttcttaacatgctctacaaattctggctgttcatctaagttaatttcgcggtattccacatgattgctatcgaggaatcgcttggtcattttgcattgaacacaattattttttgaataaatggttaccatttcttttccgttctcctatcgaaatataaatctgtaaacagtataaacaaaatccagcaacttgtcaacaaaataaaactaaatattgtgcaaagatatgaaatggagttttcaaagcacaatatattgtggtgagtgaaaagtgtgaaaatcgaagaaatgggataggaataggctttaaagcatctttaattagttataattttttggtgaatcaatatcctgtggttcaagagcttcttttcattgaaagcggaggaaaatgttacttataatatagtagaaaattgaaaagatattttctctgttcttcaggtgcttcttaaaatgtatctaaattgggatttttcgcagtctttttctgtaagtcagtgataaaaatcttgaaaaaaatttcaaaagatgatataataccaaattgtaagggttatcaaaaggtaactcaaaaactatttttaaaaaggagagtcaaactatggcttctaaagatttccacatcgtggcagaaacaggtatccacgcacgtccagcaactttgttggttcaaactgctagcaaatttgcttcagatattactcttgaatacaaaggtaaatcagttaacttgaaatcaatcatgggtgttatgagccttggtgttggtcaaggagcagacgttgtaatctctgcagaaggtgctgacgctgatgatgctatcgcagctatctcagaaacaatgactaaagaaggattggcttaaaaatatgacaaaaatgctaaaaggaattgcagcatctgacggtgttgccgttgctaaggcatatttgctcattcaaccagacttatcatttgagactgtttcagtcgaagatacaagtgcagaagaagctcgtttggatgcagctcttgaagcttcacaaaacgagctttctcttattcgggagaatgcagtagcaagccttggtgaagaagcagcgcaagtttttgatgcgcatatgatggttcttgctgaccctgaaatgattggtcagatcaaagaaacaattcgtacgaaaaaaatcaatgcagaagctggcttgaaagaagtcactgacatgttcattgcgatctttgaaggaatggaagacaatccttacatgcaagaacgtgcagcagatattcgtgacgttaccaaacgtgtccttgccaacttgcttggtaaaaaattgccaaaccctgcttctatcaatgaagaagcaatcgtggttgcgcatgacttgactccatctgatacagcacagttgaacaaaaagtatgtaaaagcttttgttacgaatatcggtggacgtacaagtcactcagctatcatggctcgtacacttgaaatcgcagctgttcttggtacaaataacattacagaacttgtcaaagatggcgatgttttggctgtttcagggatcactggtgaagtggtaatcaaccctactgaagaacaaattgcagagttcaaagcagctggtgaagcttatgccaaacaaaaagctgaatgggctctccttaaagatgcgaaaacagtgactgctgatggaaaacacttcgagttggctgccaacatcggtacacctaaagacgttgaaggtgtgaacgataatggtgcagaagctgttggtctctatcgtacagaattcttgtacatggattctcaagacttcccaacagaagatgaccaatacgaagcctacaaagcagttcttgaaggtatgaacggtaaacctgtggttgttcgtacaatggatatcggtggggataaagaacttccttacttcgaccttcctaaagaaatgaacccattcttaggtttccgtgctttgcgtatttctatctctgaaactggtaatcaaatgttccgtacacaattgcgtgctttgcttcgtgcatctgttcacggtaaattgcggatcatgttcccaatggttgctttgttgactgagttccgtacagctaaaggtattctggaagaagaaaaagcgaaattggttgctgaaggtgttgccgttgctgacgacatcgaagtagggatcatgattgaaatccctgctgcagctatgcttgctgaccaatttgccaaagaagttgatttcttctcaattggtacaaacgacttgatccaatacacaatggctgctgaccgtatgaacgaacaagtttcatacctttaccaaccatataacccatctatccttcgtttgatcaacaacgtgatcaaagcggcgcacgctgaaggcaaatgggcaggtatgtgtggtgaaatggccggtgaccaaactgctgttccacttcttgtcggaatgggcttggatgagttctctatgtcagcgacatctgtccttcgtacacgtagcttgatgaagaaactcgacacagctaaaatgcaagaatatgctaaccgtgctcttactgaatgttcaacaatggaagaagttcttgaactttcaaaagaatacgtgaacgtagactaagaatttaacaagactaagacaaatccgtcttagtctttttttgatttttttacattgttcataaaaatgttcattttattcgtaataaactagttagtaataaaaatagcgatttgaatgttcggttttttgtttatttttcctcgtatatatagtataatcgtaagtaagattaggaggaaagcgaaggaatgaagtaaaaggttcgggaaagaaaatggaaaaacttttcctgataaatttacatgattttacaggaatcaacttgaaaattaagtgattttatagtaaaataaaaacaagtagaaaacgctttcaaaaaaataaagaggtgagtatatggatagaagcacagacttatggacatttggaagaggggataatttccatcttcaagagtacttaggagctcacaaggaaacaaggggagaacaagaaggctttaccttccgtgtttgggctcccaatgctcaggcggtggatctgattggtgatttcactgattgggaagcctgtaaaattccaatggttcgtaatgaaggaggcgtctgggaagtcttctgttccgatgcaaaagagggagatatttacaagtatttggtgactcgacaaaatggtcatcaggtgcaaaaaatcgatcctctagcgttatggatggaaaagagacccaatacaggatctattattaagacgattccagagaaaaactggaaagatggtctctggagagcacgccgcaaaaaacttggttttaaggaacgacctgttaatatttatgaggttcacgcaggatcgtggaaacgtaatgaggatcacagttcctataccttcaaacaactaaaagaagaattgattccatatttggtggagatgaactacacccacgtggaatttatgccagtgatggcccatccattgggcttgagttggggctatcagctcatgggatattttgccctcgagcagacttatggtagtccagaagagtttcaagattttgtggaagaatgccacctcaacaatatcggagtgatcgtggattgggtgccaggacatttcatcatcaatgatgatgccttggcttattatgatggaacaccaacctttgaataccaggatgaacatcgtgcccataactacggatggggagccttgaacttcgatttagggaagaatcaagtccagtcattcttgatttctagtttgaagttttggattgatacctatcatttagatgggattcgagtcgatgctgtgagcaatatgctctatcttgactacgatagtggtccatggacaccaaatattgatggtggaaacctcaactacgaaggcgttcatttccttagacgtttgaatgcgattatcaagaacgaacacccagatgtcatgatgattgcagaagaaagttctgctggtcaaaagatcacgggtcctgaagaagaaggtggacttggctttgactataaatggaatatggggtggatgaatgatatccttcgattctacgaagaagatcccatctaccggaaatttgactttaacctggtaacctttagtttcatgtatgcattttctgaaaacttcttactaccattttcacatgatgaagtggtgcatggtaagaagagtttgatgcataagatgtggggagatcgttacaatcaatttgctggactccgtaacctcttgacctatcagatttgccatccaggtaagaaattactctttatgggttcagaatttggtcaatttttggaatggaagtcagaagagcaattggaatggggcaatctagaggatgaaatgaatgctaagatgcgtcgtttcacttctcagctcaatcatttctacaaagaacacaaggaattgtgggagattgatgatagctttgatggcttagagattattgatgcagataaccgggatcagagcgtcttgtctatgatccggaaaaatcgtaagggtgatcttttggtgtgcgtctttaatatggcaccagtagaacgcaaggactttacgattggtgtgcctatatcagcggtctatgaagaaatgtggaatacagaattagaagaatggggaggtgtctggaaagagcacaatccgacagttcagtctcaagatggactgtggaaggattatgaacaaactttgacctttactttgccggctttaggagctagcatttggaaggtgaaacggaaggttcgcaaaacgaaatctaaaacatcagataaaaaatgatgatcggttgactctaagggagtccaagctttaaaaagaggaagtagtcaatgaagaatgaaatgctcgctttaattcttgccggtgggcaaggaacacgtcttggaaaattaaccaaaaacatcgcgaaacctgcggttcaatttggtgggcgctatcggattatcgattttgctctctcaaactgtgccaactcaggaattcacaatgttggtgtgattacacagtatcaaccacttgcccttaacagccatattgggaatggttccagctggggtttagatggaatcaatacgggtgtgtctattctccaaccttattcagctagtgaaggaaatcgttggtttgaaggaactagccatgctattcttcaaaacatcgactatatcgatagcatcaatccggaatatgtcttgattctatctggggaccacatttacaagatggattacgatgacatgcttcaagcgcacaaggataataacgcaagtttgaccgttgcagtcctagatgtacctttgaaggaagcaagccgttttggaatcatgaatacagatgccaataatcggattgtcgaatttgaagaaaaaccagctgaaccaaaatcaactaaggcttcaatggggatttacatctttgactgggctcgtctgcgcaatatgttggttgctgctgaaaagagtgatatcgatatgtcagacttcggtaaaaatgtcattccaacgtatctagaatcaggcgaaagtgtttatgcttatgaattcaatggttattggaaagacgttggtacgattgagtctctttgggaagccaatatggaatatatcgatccaaataatgccttggatagtcgcgatcgtcactggaaaatctattcacgcaaccttatttcaccaccaaacttctttggagaacatggtcacatcaaagattctcttgtcgtcgacggttgttcggtagacggtacagtcaaacactccatcttatcaacagaagctcaagttcgtgaaggagcagttgttgaagatgctgtcgtgatgagcaatgccattatcggtaaaggagctgtcgtgaaacgcgcgattatcggagaaggtgcaatcattgcagaaggtgtcgtgattgatggaacagaggaagtacaagttgtcggttacaatgaaaaagtgggggtagcaacagatgaagattgataaatattcagccattttaggaaatacagttgggtatcatgatatgtccactttgaccagccatcgtccggtagcctccctaccgtttgatgggaaataccgcttgattgacttcccgttgtctagtcttgcgaatgctggtattcgtagtgtttttgggattttccaacaagaaaatattagttcggtctttgaccatattcgttcaggtcgtgagtggggcttgtctactttattgagccactattacctcggaatctataatactccagttgaaaatacaacggtagggccagaatactaccaacaattattgacctatttgaaacggtctggttccaaccaaacagttgctttaaactgtgatgttttgatgaatattgacctcaatcaagttttccacttgcataatagcgttgaccgtccgattacagttgtttacaaaaagttgcatcttcaaaatatctctgaagtcaatgctgtcttgaaaattgatgaaacagaccatgttacagagcaaagactttttgatggcaaggatcctgacgaagtctacaacatgtcaacagatgtctttattgtggacactccttggttgattgaaaaaattgaagaagaagccaagaaagaatacccacaaaaattgcgctatatcttgcgtgatttggcagtggaatacaatgcttttgcctttgaatatacaggctaccttgccaatattcattcagtggaatcctactaccatgcaaacttggatatgttggaaaaccaaaaattcatgaagctcttttcaccaaatcaaaaagtgtatacgaaagtgaagaatgaagaaccaacgtattattccaagacttcacatattaaatcgtctcaatttgcttcgggtagtattgtagaaggaaccgttgaacgatccgttgtttcacgtcgggtacaccttcatcaaggttcagaggtccgcagtagtcttctcttccctggtgttgtgattcatgaaaatgcaatcgtcgaacatgccatcctggataagggtgtcgaagtggctgctggtgtgacgattcgtgggacagaagaagcacctgtcgtggttaaaaaaggaacgattgttacagaggatattgtctaatgaaactattatttgttgcagctgaaggagcaccgttttctaaaacaggtggtttgggagacgttattggcgctcttcctaaatccttagcgaaaagtggtcatgatgtgcgcgtgatcctcccttactatgatatggtagaggctaagtttggagatcaaattgaagatatcttgcattttgagaccaaggttggctggagaagtcaatatgttggtgtgaaacgcattgtgcgcgatggcgtcaccttttactttattgataaccaacactatttctttagaggacatgtgtatggtgacttcgatgatggcgaacgctttgccttcttccagctcgcggccttagaaacgatggaacgagttgacttcgttccagatgttcttcatgcccatgattaccatacggcgatgattcctttcttgctgaaggaaaaataccgttggattcaagcttatcatggaattaaaacagtattgaccatccataatttggaattccaaggtcagttcgacccaggaatgttgtgggacctattcggagttggatttgaacgctatgcagatggaacgcttcggtggaatgattgcctgaactggatgaaagctggtattctatatgctgaccgtgtaacaaccgtttctcctagctatgcgcatgagattatgactgctgaatatggttgtggcttggatcagatccttcgaatggagtctggcaaggtgaccggaattgttaacgggattgatgcggatctgtataatcctgaaacggatccactcttgacgtatcacttcagtctctcagatctttcaggtaaagcagctagcaaacgagctcttcaagaacgtgttggtctacctgttcgcgatgatgttcctttgtttgggatcgtctctcgtttgacacgtcaaaaaggttttgatgtggtggtagaagagttgcatcaacttttgcaaaaggatattcagattgtcttgctcggtacaggagatcctggatttgaaaatgcctttgcttggtttggtcaagcctacccagataaactttcagcgaatatcacatttgatgtccaattggctcaagaaatctatgcagcgtcggatgtcttcttgatgccaagtcgctttgaaccgtgtggcctttctcaaatgatggccatgcgttatggaacccttcctttggtgcatgaagtcggcggacttcgtgataccgttcaaccgtttaatgctgttgatggaagtggaacaggctttagcttcaataatttgtctggctattggttcaactgggcagttgatgaagccttggctgtctactacaatgacaaacaggcttggtatggtctccaagagcaagctatgacgcgtgacttctcatgggatacggctagtcaacgatacaatgatttgtaccaatctttataaatagatctatgatacaaacgcctttcgaggcgtttttttgtgttgctttcttcctataaagaaaacggtttatatttttgagttttagagcttgctaaaatagaagaaaaaagataagataggtaaaggtaaaaaatcccgggaaggttcttatttctggaaaggatcccagcctctctaaaaataatcaggtccctgctcgaggattaaatattactatataggaattttaggatgaaaaaagcgaaacaaacgtttgaaaaaatgaccaaatattcgattcgaaaattatctgtcggtgttggtccggtagccattggagcctttttattaggaggaagcttgttaggagctcgtcctgtccaagctgatcagatgactctacctgctcatgtgcacttaggatatgtgacagaagaagagctgactgctgaagaaaaagcacaggtgattcatgcaatccctgaagcatatcaaaatgaagatactttctatctcgtctataagaagaaggaagtaactcagtcggttcttcctcaaacaggaagtcaggaagttgccctctttggcctaagtttagctacagcttcctttgcggtcctcttactttctaaaaagcaccggaagaaggtcatgggcgtccttttgattggagccatgggacaaagtcttctacttccagttgaagtcgcagccctacaaaatcaagttttgcgcgcctataatcaggatcttgcgatcgcatcgagcaaagatcttgcaaatggcgtgattcaaattgacggctatgactatattggttatttgcgctacccgtcagtccaaaagacgagcttacaagagccaaaggctatgcaggaaacgaaaccttctgtagaaggaacgatcaaaacaagtacagggattccacaagtggaaccacaagcgcgtgtgacgccagaagtcgctccagcctttcctcaagttgaaaaaccaagcctggaagtctctactgagcctgtgccatttgaaaccgtcaagcaagctgatcctacattagccaaagggcaaaccaaggtgctgactgctggccaaaatggggagcgtaccatattgacggaagtgagtgtggtagatggacaagaagttcgcagagtagtcgaaagcaaggtcaccaaagaaccagtttcacaaattcttgctgttgggacaaaagaagatgcccaaccaacccctcaacccagcccttctccagttgtaacggctaaggggacacaagaagaaggccatgtcggcgaagctcctgttcaaccagagaatcaagcctatacaggtgtggtggaagccaaggggacacaagaagaaggccatgtcggcgaagccccagttcaaccggagaacccagtctatacaggcgtggtggaagccaaggggacacaagaagaaggccatgtcggcgaagctcctgttcaaccagagaatcaagcctatacaggtgtggtggaagccaaggggacacaagaagaaggccatgtcggcgaagccccagttcaaccggagaacccagtctatacaggcgtggtggaagccaaggggacacaggaagaaggtcatgtcggtgaagctcctgttcaaccggagaacccaacctatacaggtgtagtagaagccaaggggacacaggaagaaggccatgtcggtgaagctcctgttcaaccagagactccagcctatacaggtgtggtggaagctaaggggacgcaggaagaaggtcatgtcggcgaagctcctgtccaaccggagaacccaacctatacaggtgtggtagaagctaaggggacacaggaagaaggtcatgtcggcgaagcccctgttcaaccggagaacccaaccgatcaagtaacggaagggacggtaacagagacagaaacggtaatccttccatatgaaaccgagtatgtagcggatgccaatcgttacaccgatgaagaaagccttcttcagaaaggtgaggccggtagccaggaaattcgccgtgtttataagacggtcaatggcgagaagattggcgagcccgtgagcacgacaactgaaacagtaaaagctcctgtgacagaaaaaattagtcgtgggactaaggcgattgaaggccaaacagaggatgtttcgtttgaagaaattccatttaagacggtaaccgaacaagatgttaccttgctaaaaggaaccgaaagggtttctcaagtcggtaaaaatgggaagaaaaaaatcaccaaggtctataagaccattaaaggtgtcaaaacaacggatgctcctacaatttctgaagaagtagtagaacaagcccaagatcagatcattcaacaagggaccaaagaacttgataagcctaccttaactttgacccaggtcgataaggaagaattgaagcgcagtgctaaagctacttatcatttggataaaccagacggtgtgaccatcaagtccatccaggctgtattgaagaagggtgatcaagtggtgaaaaccctgaccctttcagagacggacttggcagctgctttagcggacttggactactacaaggattatacgctcgcaacgaccatggtgtatgaccgtggaaatggggatgaagaagaagttctcaaggaaaaaccactgagaattgatcttaaaaaagttgaaatcaaaaacatcaaggaaaccagtctgattagcgtggatgaccaaggtcttgagaccgatagcagcctcttgtctgaaacaccatcagatgtgaagccttactacttaaaggtcactacctatgataataaggttacaaaactagccgttgataaaattgaagaagtaacggtagatggcgtgaccctctacaaagtaacagccaaagctcctgatctcattcaacggactgcggacaaccagtttagtgaggactatgtccactatattgcaaaacccaaagctcatgaaggggatgtctactacaatttcaacgaacttgtaaaagctatgcaagccaatccgactggtacctttaaactgggtagcaatatgaatgcggctaatgtccagccagtagggaaatcctatgtgaccaatgccttcaagggaattttggaaagtacggatggaaatacatttgccatccataacattacaagaccattatttgggaacatcgaaggtggctcggttaagaatctcttgcttgaaaatgtcaatattgacctacctgggacagatcgagtagcaccaatcgcaggtgtcattaaaaacaatgcaactgtcgagaacgttaaagtaacaggaagtgttgtcgggaacaatgacgtagcaggaattgtcaataaaattgatggcagtgggaaggtcagcaatgttgcctttatcgggaaactgcacgctgctgggaacaaaggtggctatctagcgggtgtccttggcgagaactggaaaggtgtcgttgaaaaagcttacgttgacgctgaaatcactggtaacaaagccaaagcggcaggtctcgtttattcctctcaaaatggtgctaataactacacggtcggtaaagaaggggtcctcagaaattcagttgctaaaggttcaattgaactcaaagaagcggttcaatctggtggattactagggaccaactgggccttggggactattgaagacaacatcaccatgatgaaagtcaaaactggtgagatggtcttcggacactcggatatcgatgcagatgattacttcacctattcaagaactaagcgcaattacagtgtggaaggtgtgagtgaagggaaaaaatcctttaacaattcccgcaaaatcccaagtatctcgctggcagaagctgagcagaaaatcgaagcaatgggaatcactgctcatacattcaccagcagcaaaccgattgaagttacgctcaatcaccttattagcaaagacgatcaatacaaggccatcactgcttatgatgctactcgtgagctagcttatcgcaatattgctaaattgcaacctttctacaacaaagaatggattgtcgaccaagggaataaactggctgcaacgagtcctctcttgaccaaggaagtcttgtctgtaacagctatgaagggcaatgattttgtcacggaactagctgatgctgatcacattctgatccattatgcggataagacaaaagatatctttagcattgcaccgaaagactctaaagttaaacaagtcaaagagtacagtgtagcagagctcggtgaagtggtctacacaccgaatatggtggacaaagaccggagcgatctcattagtgccatcgtagggaaattaagtcctgtcgaattgcaatcggatccaatctacacacatcttggtcgaacaggtcctaacaaagtcaatgcgattaagaacctttacctcgaagaaactttcaaagaagtcaaggataatctggctcactttgtcaaacaactggttgaaaaccaagatcatcagttgaatacagatgaagctgccaaacgggccctcatcaagaagattgaggacaacaaggcggccgttctgttggggctttcttacctcaatcgctattatggagtgaagttcgatgatgtcaatctcaaacagctcatgttgttcaagccagacttctatgggaagaatgtcgatgttttagatcgcttgatcgaaattggttcaaaagaagattatatcaaagggactcgtacccacgatgccttccgagaagtcgtggctaaatcgactctttctgggaacctcaatgacttcttgaagtacaatatggagctctttacaagtgagccagacttgaacgattggttcatcaaagcaaccaaagacaatgtctatattgtggagcctgagacgaccaatccagcgttcgcatctgctaagcatagagcctatgagggcttaaacaatgatattcacggtaaaatgatcttgccactcttgaacttaaaagatgcccatatgttcttgatttcaacctacaataccatggcttatagttcctttgagaaatatggcaagaacacggaagcagaacgaactgccttcaaagctgaaatcgataaggtggctaaaggacaacagaattaccttgatttctggtcacgtctagcaacggataaggttcgcaatcaactcttgaagagcaataatatggttccaacacctgttctcgataaccaaaactataaaggtattagtacagaccgttatggccataccaacagtggcaaagatgtcgctccaatccgtgaattgtatggcccaaccgatcgttaccatgcaacagattggcggatgggagctgtcgctcgaatttacggaaatccttataaagacgactctgtcttctttatggtgaccgatatgatcagtgactttggggtttctgcctttacccacgaaacgacgcacgtcaatgaccgcatggtttacttaggtggttggcggcatcgcgaaggaaccgatatcgaagcctttgctcaagggatgctccaaacaccatccgtatccaatccaaatggggaatacaaggccttaggtctcaacatggcctatgaacgtcctaacgatggaaaccaatggtacaataccaatccaaatgatctcacttcacgcgaggacattgatcgctacatgaagggctataatgacaccctcatgcttttggattacctagaaggagaagctgtcctcaataaaggtagtcaagacttgaacaatgcttggttcaagaaggttgataagcaataccgaggggctaacaccaagaatcaatttgataaggtgcgtcctttgagtgatgaggaaaaagccatcaccttacatacagtagatgacctcatcaccaataacttcatgaccaatcgtggtcctggaaacggggtctataatccatcagactttggttcagcctatgtgactgtaccgatgatgacggggatctatggtgggaacactagtgaaggtgctcctggagctatgtccttcaaacacaataccttcagaatctggggttactatggctatgaaaaaggcttcttagggtatgcttcaaacaaatataaacaagaatccaaacaagcaggtcatgcgactctaggggatgattacatcattcaaaagatttctgatggaacattccgtacccttgaagactggaagaaagcttacttcaatgaagtggtgaccagtgccaaaaatggacttcaggctattgaaattgatgggactacttatagcacttatgatgacttaaaacaagcctttgcaactgctgttgaaaaagatcaagccagcttgaagaatggtgttgtcaaatttgacaatacggtttcactgaaagaaaaaatctttaagaaactacttcaacaaacagacagtttcaaaacgtctatctttaaataatcgaattctcttatctgctgagcaggtgagagttttttttagaagaaaaatgaatagaggtggacaaagcgtctaaaaattaaaagaaatcagtcgtagataggaaaaattatcatattaaaaaaataacgtaatttcattaaaacgcttacttttctaggaaatatttgactattatgtcttttaggagtaaactaataaggtaaaatttataaaaggagaattcatcatgaatttaacatttttaggtctttgtttagcctgctttggtgtatcactggcagaaggtttgatgatgagcagcctattgaaatctgcgtctcgtcaaccagaaattattggtcaattgcgtagcctcttgattcttggtgttgcctttgtcgaaggtactttcttcgtaaccttggttatggccttcattatcaaataagcacttctattttagaaaaggaggtgtcaaaacttggaagaaagtatcactccaacgataactcttggacctgtaacttttaatttgaccctacttgctatgaccttgattgctgttttggtggtttttggctttatttattgggccagtcgaaaaatgtcgatccgaccaaagggcaaacaaaatgtgctggaatacgcatatgactttgtcgtaggcttcaccaaaggaaatattggggaacattatataaaggactattccttgttcttgtttgttctttttctatttcttttagtggccaataacattggattgatggctaaaatcgaaacgaccaatggttacaatttgtggacatcaccaaccgctaacctgggttatgactttgccttttcatttttgatcaccttaatcgcccatgtagaaggaattcgccgacgtggtgtgaaggaatatttaaaggcttttgtgacacctggatttatgacccccatgaatattttggaagaattaacgaactttgcctccttggcacttcggatcttcggaaatatctttgcgggtgaggtattagcaagcttgctcgtgaacttatcacaccaagctttctattggtatccatttgcctttattggtagcatggcatggactgcattttcaatttttatttcatgtatccaagcctatgtgtttaccatgttgtcatcaatctatattggtaagaaaattaatggtgaagagtaagtagaggaggagtagaagaatgcatgtatcaatgagtgaaattattggtaactttattctcattgctggttccttcctattattaatctttttaataaagaaatttgcatggaacaatatcaatggaattttagaagcgcgtgccaaaaagattacagatgatattgatggagcagaatcagctcgtcaaaaagctgaggaactagcaagtaaacgtgaagaagagttggcaggtagccgcaaagaagctgcgtctattgtcgaaaatgcaaaggaaactgcagaaaagaacaaatctcagatcctttcagaagccactcaagaagcagtacgtttgaaagaaaaagcgcaacaagaaattgcgcataacaaagaagaagcattgaacagtatcaaaggcgatgtggcagatctcactgtcaatcttgccagcaaattgttgagtcaacagctggatgctgaaggtcaacgccaactgatcgatcgctatcttgatgaattaggagaagcctaatggacaaaaagcaactgatggtgattgagaaatatacccagccttttgttcaattggtctttgaaaaaggagaacaagatcttgtctttgaaaaattgacccaaatcaagggcatttttgaggagactggacttgctaacttcttagctcatatcggtgtagaggatgaagagaaagcaaaaagtctaagactttttcaaccctctgattcacaattactcgaccatttgattgaagtggttattctcaatcatcgtgaagccttattttatgacattgtaacgatttgtttggatcagattcaactgttgagcaacgcatttgtcgtcactgttacgacagttgctggtttggatcctgttcaagagcaaaagctagtacccattatcgaaagaaaatttgggattcaagttcgctcgatccaacaaaagatcgatccagatttaattggtggctttgtcgtgacagccaatcataaaacgttggataccagtctcaaacaccaattgcaagttataaaatctaaattgaaatagaaagtggtgtgaattttggcgattaacgcacaagaaatcagcgctttaattaagcaacaaattgaaaatttcaagccaaactttgacgtcactgagacaggtgttgtaacctacattggtgacgggattgcccgtgctcatggtcttgaaaatgccatgagtggtgagttgttgatctttgaaaatggctcatacgggatggcccaaaacttagaaacaacggatgtcgggatcatcattttgggtgatttcacggatattcgtgaaggagactctgtccgtcgtacaggtaaaatcatggaagtccctgcaggggatgccttgattggtcgggttgtcaacccacttggccaaccagtggatggtttgggtgagattgtgacagataaattccgtccagttgaaacaccagctcctggcgttatgcaacggaaatctgtctcagaacccctacaaactggtttgaaagccattgatgccctcgttccaatcggacgtggccaacgggaattgattatcggggaccgtcaaacagggaaaacttcgattgccatcgataccattttgaaccaaaagggtcaagacatgatctgtatctatgtggcgattggtcaaaaagaatcaacagttcgtacgcaagtagaaactcttcgtaaatacggagccatggattatacgattgtggtaaccgcttcggcttcccaaccgtctccattgctctacttggcaccttatgccggggttgccatggcagaagagttcatgtataacggtaaacacgttttgatcgtctatgatgatttgtcaaaacaagccgtagcctaccgtgaattgtcccttcttcttcgtcgtccaccaggacgtgaagccttcccaggggatgtcttctatctccacagccgtttgttggaacgttcagctaaagtttcagatgaattgggtggtggctctattacagctcttccaatcattgaaacccaagcaggagatatttctgcttatatcgcaaccaacgtgatttcgatcacagatggacaaatcttcttgcaagatagtttgttcaatgctggtattcgtccggccattgatgcaggttcttctgtatcccgtgtagggggagctgcccaaatcaaggctatgaagaaagttgcgggtactcttcgtatcgacctcgcttcataccgtgaattggaagccttcacgaaatttggtagtgacttggatgctgcgactcaagcgaaattgaaccgtggccgccgaacagttgaagtcttgaaacaacccgttcatgaaccattgacagttgaaaaacaagtcgtgatcttgtatgccttgactcatggtttcttagatagtgttccagtagacgatattcttcgtttccaagaagagttgtttgattactttgaagcacattatcatcaaatctttgagacgattcgttcgacacatgatcttccagcagaagaagaactggatgcagcccttacagaatttgtcaaccagtcaaatttcaaatagaaataggagtggaagatggcagtttcattaaatgatataaaaaataaaattgcatccactaaaaatactagtcaaattaccaatgccatgcagatggtgtctgctgctaaactcggaaaatcggagcaagcagccaaggattttcaggtttatgctgctaaggtacgtaagttactaacagacttgctccatggacatgaaacagaaaatgctaagtccaatcccatgttggtgagtcggccggtaaaaaagacagcttatatcgtgattacatccgatcgtggtttggtcggaggctacaatgcctccatccttaaaaccatgatggaaatgaaggcagaataccatccaactggagatgactttgaagtgatctgtattggaagtgtcggggcggatttcttccgtgcccgtgggattcagccggtttatgaattgcgtggtttgcctgatcaacctagctttaaggaagttcgtacgatcatttcgaaaacagtccaaatgtatcaggaaggcttgtttgatgagttgtacgtctgttacaaccaccacgtcaacagtttgacgagtcaaatgcgggtagaacagatgcttccgattattgatttggaccccaatgaagcagatgaggattatgtattgaatctagaattggaatctagtcgagatgccattttggatcaattgctccctcaatttgctgaaagcatgatctatggtgccattattgatgctaaaacagctgaaaatgctgctgggatgatggccatgcaaactgcaacagacaatgccaagaaagtcattgatgaattaacgattcaatacaaccgtgctcgtcaagcagcgattacacaagaaattaccgaaatcgttgcgggtgctagcgcccttgaatagttgtcggatacaattttatatacaaaaacagatgctcgaaaaagaacttttgagcagtagaaattacttagaataggagaatgacatgagtttaggcaaaatttctcaggtcgtaggtcccgtcgtagacgttgccttttccgttggagataaacttcctgagatcaataatgcgcttgtagtctataaaaatgaccaacaaaaatcaaaagtcgttcttgaagtagctttggaacttggtgatggggtcgtacggaccattgccatggaatcaactgatggtttaacacgtggaatggaagtcttggacactggtcgtccaatctctgttcctgtcggaaaagaaaccttgggacgtgtcttcaatgttcttggagataccattgacttggatcaaccttttgctgaggatgctcctcgtgactccatccacaaaaaagctccatcctttgacgagctctctacttcagaagaaattcttgaaacagggatcaaggttattgacctcttagccccttatttgaaaggtgggaaggtcggactcttcggtggtgccggagttgggaagaccgtcttgattcaagaattaatccataatattgcccaagaacacggtggtatttctgtatttaccggtgttggggaacggacacgtgaagggaatgacctttactgggaaatgaaagaatctggcgttattgaaaaaacagccatggtctttggacaaatgaatgagccacctggagcacggatgcgtgttgccttgactggtttaaccattgcggaatacttccgtgatgtcgaaggtcaggacgttctcttgtttatcgacaatatcttccgtttcacccaagccggatctgaagtatcagcccttttgggacggatgccatcagccgttggttaccaacctactttggcaactgaaatggggcaattgcaagaacggattacgtcaaccaagaaaggttctgttacatccatccaagccatctatgtgccagccgatgactacacagacccagcgccagcaaccgcctttgctcacttagattcaaccaccaacttggaacgtaaattggtacaattggggatttaccctgcggtggacccattggcatcaagctcacgtgccctttctccagaaatcgtaggagaagaacactatgcagtagcttctgaggtcaaacgcgtccttcaacgttaccatgaattgcaagatatcattgctatcttggggatggatgaattgtctgacgaagaaaagaccttggttgctcgtgctcgccggatccaattcttcttgtcacaaaacttcaacgttgcggaacaatttacaggtcaacctggttcttatgtaccagttggagaaactgttcgtggctttaaagaaattttggatgggaaatatgaccatcttcctgaagatgccttccgtggtgttggatcaatcgaagatgtgatcgccaaagctgaaaaaatgggattctaagaagaggtgaaagatgagtcaaatgaacgtccaaatcgttacaccggatggactggtttatgatcatcatgccgcatttgtatctgtcaagacaattgatggtgaattagggattttacctcatcatatcaataccattgcggttttggctgtagaccaagtaaaggttcgtcgtgtcgacgatgacaaacatattgattggattgcagtcaatggtgggattatcgaagtagctgataatgtcattaccattgttgccgattctgccgaacgtgctcgagatattgacattagtcgtgcagaacgtgccaaactgcgagctgaaaaagcgattgaagaagccaaagatcagcattcggttgatatggaacgtcgtgctaaaattgctcttcaacgcgccattaaccggattaatgtcggaaatcgtttataagatattcaaaataaggtggaggtatgtcctcaccttatttttgttgggagagaatcaaaagaagaaagtacggaccaaatatggtataatagctgtatgattcaaatgatttttaatctttcaagccatctattgtttatcttttttgcctattacctattgatgaacctggttcaatgggaaaagtttttaaaagtaagtgctgaaaatgcggttaaaatccgttttttgatcttgatgatcagcgtcggaatcggctatctagccagctcattttttatcagtgtctatgagatgagtcgacagatttttattggccaattctagccacattttataaaaaatatggtatgatagaaagcgtgactttaagaaattggagaacaatcccgtatggaaaaaataatcgttaatggtggtcataatcgactggttggaaccgtcaaaatcgaaggagcaaaaaatgctgtccttcctcttcttgctgcaacagttctagcaagcgagggtgtgacaaccttgaaaaatgtacctgttttatcagatgtctttacaatgaacaatgttgttcgtgggttgaatgcacaagtaaccttcaatgaagaagacaatacggttgtcgtagatgcgcaagcaaaattatcagaggaagcaccttataagtatgtgagcaaaatgcgtgcttctatcgttgtcctaggtcctgtcttggcacgcaatggccatgccaaagtttccatgcctggaggctgtacgatcggtagtcgtccgattgacctccatctcaaaggtctggaagctatgggagctgaaattacccaaacagccggctatattgaagcaaaagcagatcgtctcaagggagcacacatctatatggacttcccatcagtaggtgcgacacaaaatattatgatggccgcaaccttggcagatggagtcactgtgattgaaaatgcagctcgagaacctgaaattgttgacctagctctcttgctaaataaaatgggggctaatgttaagggagcaggaactgagaccttgaccatcgtcggagtggagagcttgcatggtgcaaaccacaatgttgtgcaagaccgcatcgaagctggaacctttatgattggggcagccatgactggtggagatgtcttgatcgaagatgccatttgggaacacaaccgtccgcttctatctaagatgcaggagatgggtgtaacggtaaccgaagaagaaaatggaattcggattcaatcggatatcagtaagctccgtccagtgacggttaaaacccttccctatccaggattcccaaccgatatgcaggctcaattcacagccttgatggccatggctaaaggtgagtctaccatgattgaaacggtttttgagaatcgcttccagcatttggaagaaatgcgtcggatgggcgttcactcagacattatgcgggatacagctcgtatcgttggaggagaaagcttccaaggtgcagaggtcatgtcgactgatttaagagcgagtgcaaccttggtcttgatgggcttggtagtagaaggagaaacgaaagtcagcaaattaagtcacttagatcgtggttattatcaattccatgagaaattggtggcactaggtgcagacgtgaaacgtgtagaggaagaagacgatgaaaactaatcttcgctatgttggaaaacagctaggaattgtcctcctgttggctgtgattggaatcatcatttttgcagttggtttggtcattggctatggagtgattggagatggaaaaaatccatggtccattctctctccggacacttggtcagagatcattggaaagctaacaggcaaataagcttttaactaaaattgagtaaaaaggagagcagcgaatcgagtcaatgacccatctagcgctgctcttttttggagagatgtatggcaaaacaaacagtaagcaaacgaaccaaacaaacattagcaggttttgtggtggcaacggccctagctattgggggctattattttaatcaaccgacggtaaaagaagcgacagatcaggttgtttcggtggtgactagtagccaacaagaaacacctagtaaagagttagctagctctgtactaacgaaatctgcccgttcacaattgggaaatgacttggaatggaatggtgctggagcctttgtagttaagggaaatcgcacagatctggatgccagcgtggctagtcaaccctatgcggataacaagacaaaagaagtgaatggaaagacagtaccgacggttgcgaacgccattatgaccaaggcaactcgccagtacagagatcgtgatgcaacaggtagtggcctaaccgattggaaaccagcaggttggcatcaggtccacaatctgtccggtgagtatgaccatgctgtggatcggggccacctattgggctacgccttgatcggtaatctcaaaggtttcgatgcttcgacaagcaatcccaaaaatatcgctgtgcaaacggcttggtccaatcaagccaatgatcctcattccaccggtcaaaactactacgagaccctggtccgaaaagcactggataagaacaagcggatccgctatcgggtcaccttgatctacaaccagccagaagatttgattccattggggtctcatattgaagccaaatcgagtgatgggagccttgagttcaatgtttttgttcccaatgttcaaagtgggattagtctggattaccagacaggaaaagtaaccgttcatcaataagctggaaagcgcagttatttaagttatttttaagaatggggtgttacaattgcataccttctttaagagaaaggagaatgtatgagaaccatttttcgatttttcagaggaatccttcgcatggcttggagtcttttttggggatttttctggaccattgccatcagttttctcgttctagtggggatcatctatttcacagattctcctagttctggtatggatgggtttggacgagctgcccaaaaggttgtctatcaagtcggcaatttatttggtgatcagggctttgcatcgcgctttgggatggcgcctagctcacagaccacgcaaacggacaatcatgagcatagtggcgcccgctgggaaaaagcggaagctacggtctatttggatcccaatatcagtcaaacttttgtaaaagcttatcgggatgctattgaggcttggaaccaaacaggagcctttaccttcaagttggttacaaatgaaaaagaggctaatgtggtcttgacggaaatggataacgcatcggtttctgctgcaggagagactgcctctcagactaatcttttaaccaaccgcttcacccacatcacagtgcgtctcaatcgccattatcttttaaattatgtctataactatagttatgatcggattgtcaatacagctgagcatgagctaggccatgcgattgggctggaccacactgatggagaatcggtcatgcaaccggctggttctttctacagtattcaggatacagatgtggaagcagtccggcaattatacaaggaagaataagttttaaaatactttctaaaagttctgagcctcaaggggctcaggatttttttgatggctcgtctttccttgtttaatctgaaaaaagatagtaaaataaggacatgattattttacaagccaacaaaattgaacgctcttttgcaggggaggttctttttgataatatcagcctgcaagtggatgaacgggaccggattgccctggtcggaaagaacggagccggcaagtctacgctcttgaaaattttggtgggagaagaagaaccaacttctggggaaatcaataaaaagcgcgacctttccctctcctatctagcccaggatagccgctttgagtcgtccaataccatctacgatgagatgctccatgtctttgatgacctccgtaaaacggagaaaactttgcggcagatggagcttgagatgggggaaaaaactggggctgacttagaaaaactcatgcaggattatgaccgtctatcggaagaattccgtcaggcaggtggcttcacctatgaagcagatatccgcgctattctgaacggctttaagttcgatgagtctatgtggcagatgaagattgaagagctatctggtgggcaaaatacccgtctggctctggccaagatgctcatggaaaaaccaaatctcttggtactggacgagccgaccaaccacttggatattgagaccatcgcctggttggaaaactatctggtcaactatagtggggcccttcttattgtcagccacgaccgctattttctcgataaagttgctaccattacactggacttgaccaagcattctttagatcgctatgtcggtaattactccagctttgtcgagcaaaaagaacaaaaattgctgaccgaagccaagaactacgagaagcaacaaaaagaaattgctgcgctggaagactttgttaatcgcaatttggcgcgggcttcgactaccaagagagcccagtctcggcgcaagcagttggaaaaaatggagcgtctagacaaacctgaagctgggaccaagtctgcccatatgaccttccattctggtaagacatcgggaaatgtcgtcctgacagtagaagaggcagccgtcggctatgacgatcaaatcctctcagagccgatcaatctggatatccgcaagatgaatgcggtcgctattgtaggaccaaatgggattgggaaatctactcttatcaagtccatcattgggcagattccttttatcaagggggaagtccgttttggggccaatgtcgaggtgggttactatgaccagacccaaagtaaactaacgccacacaacagtgtcttggatgagctctggaatgactttaaactgacgccagaagtagaaattcgcaatcgcctgggagcctttcttttctctggcgatgatgtcaagaaaaccgttggcatgctgtcaggtggagagcgggcacgcctgctattggccaagctttctatggagaataataacttcttgattcttgatgagccgaccaaccacttggacatcgatagcaaggaagtactggaaaatgccttgattgattttgatggcaccctgctttttgtaagccacgaccgctactttatcaatcgggtagcgacccaagtcttagaactctcagaagagggctcgaccctttatctgggagactatgattattatctggagaaaaaagcagagttagaggcccttgctgcagcgcaagcagaagctgagcctgcttcttcaacggaagaagtcaccagcaatgattattacttgcaaaagcaaaaccagaaggaactccgtaaaatcacccgtcgcattgagcaattggaagcagagatggaagagctggatcaaaaaatccaagccatcaccgaaaccatgcatagcaccaatgatgcagaggatttggtccaactgcaaagcgagctagaccaactgactattcaacaggaagctgtcatggaagagtgggcagatctgtcagagcaggtggaatagattgtctcgttgaaaagttgttttagaaattttacaactgagagtatgaattctctatggttacagtctttaggattcctgaataaggaagaaggaagaaatgaataaaaatgtatttagtagatccttgggaatttggttattggcgatagggttgctagtttatagctatttctaggcaataccagggctacattcccttgaacctcctcaaaaattgtataagcagggcttggtgtataggtcgcaagatagtgaggatattttgtcagtgaaagtattggacatagatctaattccagttaaaacagatgaggcccaatattatttaattaagcatgactatggtgttacggctatgaagacaacttttaatactgtctattcaatgcttaaaatgaaagacagatttcctaatcaagaaatcccactagaatcaggtggattctatctaagtgtcaaagtgattcctgaggtagagaacagacgaaaaggcggcatgaagattcatttgcgttttgaatatgctgacaagaaacaagattcgattctctttagaagacaattattacgtctcaaggatcttgtggaatatttaaacgaagaatacaacttaggattgaaagtggattttagactcctagggtaatcaacggagagtaagatgaacaaaaagatatttgttaggacactatttgactggtgtgtcgttgttgttttatcggttgtttgctattttgatatacagccagctattcatatgaatacgaacccggaaaaattgtatcagcaaggctatgtttataaggcagagaatagtgaagatgtattagcgataaaagtgctggatattgaccctaacccgattgagagaaagaataatacttattatttagttaaacatgaatatggggtcacagccatgaaggtcattaaaggaagcgtaaacaaactacttgagatgaaagaagcacttgctcctcaagaaaatcctttggaatcttctgacttttatcttcatgtacaggtgttgcctgaaattcgcaagaaaagaaaaaaaccagatatagtcattattagccaagaatttaaggacatcattcaagagagatttaaccaaagcgacctttcaaaaggcggggatactgtcgataagacgcatcttcttgatttgatggacgacaaaggggtagctcattttctcgtgaaacctgtattggtgggacttgttgcagtttttttcttcatcaatacaatcagaagaattttatatatacgtagacagttcatgctctttaatacattgtttccagcttatacggatcaaccggagaaattagtgaaagatgcggactatagtgacaaaaaactggaacttcttgtgcaccagggcgtcctcgttttttatggcatggattttgaaatactgccagtagatgacattgaagaaataaaactttttagggtccatagaaaaagtttttatcgctacaagatgaagattatcttttattcaagtcgccggccttatgtttttgaaattaataaaagtaatatggaggcctactatcccttcatcgactatttaagaagtcttgcaccaatcgttgttgaagatggatggaagatgaattacaggtaaagggattggggacgataatctacaaataatcctaaaaagtgactcgaggcaggtgatggtgcttcgagtctttttctcatctaatgttatggtttagaaaaatgagaaaggagtcattgattctgatgataagtgactatgtagaaaaccgtttaaggctaataaagcaaacaggctatattattgtgtctaatagttatgatttggaatatacctcacataaagcatttgaaaatctaactagttaggatggaatcatgtcaattaaacattagatatataaggcctgtttcgttattatgaggattctttacaatttagagttaaaaaactgttgagaagattctggaattctatctatataaaaaacaccccaaaagtcagattttatctatataacttttggggtgtagttcattcggtgtttttttagttgttatttttttcttctgctttaacttctttcttttcttcctccagttgcttttgagtgctcttgagttctttttttagggagaagccctttgaaaaattaaccaaggtcatgacaaatgcacccaagaggacacagagcaggatcagaatgatcaaaggcaatttaaattggaccaagaggaaatttacggtaaccgattgcatgtttgcaagggaaataccagcaatcaataaaattaaaagtaataaagcaatgtagtgtagattatttttgttcatcattatctccttattgttcagcaggggccttgcttttcacatcagcgtactcttccggctgctctaggcttagaatctcctcataagccggtagggaaaggtccttgccatatttattttttaaagcagtgctcactagtcgataggccaaattggcatttcgggacaagataggaccgtggaagtagctgccaaagacgttcttgtaatgaaccccttcgcacccatcttctttgttgttcccatttccatagacgaccttacccagcggtttttcatcctcagccaagaaggtccgaccttggtggttttcaaaaccataataggtttcgttaaattcttcgttatggattttgatatcaccgatatagcggttgttgacttggttgagcgtatagtggcccataatgccaagtccctcaatgcgtttgccagaagcttcaatgtagtattggcctagaagctgaaagccaccacagatagctaggaccacgccatcgtcatgaatgaagcgttcgaggtcttcttttttatctggtagatcctcggatacaatggtctgttcgtagtcttgcccgccgccgaaaaaggcgatatcgtaggcatcagggtcgaaccggtctttgagagagacgatatcaacagtgacatgggctccaagcttttccgcaacgtacttgagcatgaggatattcccattgtccccataggtattcattaagttgccatagagatgggcaatacgcaggctgtagggatactgtgcctgatcagaagattctagggaagtataagtcattagtgcatctccttttcaatcaggtgttcttgggccaaaagttcacggaattctagcatggctgtataggtagctaaaatgtaagcgtgaggggtttcctgttgctggatgcgttggaaaacctcttttaattcagccatttctgtgatcttttctgcaggatagccagtgacccgaagtcgccgagcaatctcagagtggcgcaccccgccagcgttgatctctggaatgtccatctgagtgatttgctcgaagtcggcatcccaaatccagctggtatcaatcccatctgcataattggcattgaggagaaccgacaagctaaagggataaggggctagtttgaacatttcaatggcttgggtcgcaccaaccggatttttaatcaggactagggtacattccttatccccaatcttaaaggtttcctggcgaccaaagacagcgcgactgcgatcaaatccttgcttaatcacttcaggttgaaccccaaagaatccagcaacggaaacagctgctaaggcattatagatgttgtagagaccaccgatattgatgtggtaatcttgcccttggatccggaattgggaagagcgatgggttaaagagaggaggtccgatacggcataggtcagagggggccggtggaaaccacagtgctcacagatataatctcccaggttagcataggtattgagcttgtacttgaggatgttgtgacaatgcgggcacaggattccttccgtattgtaatgggctagttgtggctctgatttgtctgtatcaaatccataatattggatcggattggataaggtctgactattaaagagcggactatctccgtttaacagaaccgtcgcagttgggaccttgtgaatggcatccaaaatcatctggtaagttgtatagatctccccatagcgatccatctggtcccggaaaatattggtgaccacaaaaaggctgggcttaatataatcacaaatacgagagaggctggcctcgtcaatttcaagtaccgcaatcggtcgatttgatttcgaatgtttggcccgtatgaaggtcgtcgtgattcccgagatcatattggccccgcttggattggtcaaaataggtccaaaagcttcttggagaataccaactgttagcgcagtggtcaaggtttttccatttgtccctgtaatcacaacaatctcatagtttttggccagttgactgagaatatctttatcaaatttgagggctactttacctggtagggttgatccccgccccattttttctagaatagagccggaaagctttcctgccagaaggcccaaggttgtatttatcttcataaatcatattttatcataaaaagcatcagaaggttacagaaaaatctgttgaaacgtgttataataagatgatgtcttttagagaagtggtaggtatgagaatatgaatattcaacagttttcaaatccacaattttggaccagtttgttcccaaattggtggagtgttattatcaatatcatcgatattgccctggtgtcttggttgctgtattttttgatcaaggccatcgttgggaccaagatcatgattttggtgcgtggagttattatctttttcttggctcaatttttagccaatttttttggtttaacgactatttcttggctgatcaatcaagtgattacctatggggttatcgccctggttgtgattttctcccctgaaattcggattggcttagagcgtctaggtcgggcgacagaattttttacgacgagtgaagtcagtcaggaagagaaaatggtacaggcctatgttaaggcagtggcttatatgagcccacgtaagattggtgctttggtagctattcaaggggccagaacccttcaggaatacatttccacagggattcctctggatgcagatatttcaggagaattgctgattaatatcttcattcctaatactcccttacacgatggtgccgtcattgttcgcaatgataaaatcgctgtttcttgtgcctacctgcccttgacggaaaacactgagatttcaaaagagtttggaacgcgtcaccgtgcagctattggcttatctgaagtttctgatgcctttacctttgtggtatcagaagaaacgggtggcatctctatgacctacaacggaacttttcgtcatgatttaactttagaagagtttgagtcggaattgagagccttcttggttcctgaagagaataaaacgattagttggaaagagcgtctatttgggagggtaacaaaatgagatcgaaaaaagaatttctttatgttttcgcctccgtcttattgtcctttatcttatttatcaatgcgtcttcctttaattttcaaaataatagtagcgctagacaagtgagttcagagacctacaccaatacattgaccaatattccaattgatgccaagtacaatgacaagacatactttgtcagtgggttgacatcagaggtaacggtctttctgaaaggttcaaaccgggttgctcttgctagtgagatgcaaccgggcactcggaagtttcgtgtggtagcagatcttcgtaaggccaaggaaggcaccgtagaagttccgttgattgtagaagatcttccgtctggtttgacagcaaccgtagaacctcagaaagtttctgtaaaaatcgggaagaaagcgaaaaaatcgtttgcggtcagggccacaatcccggacaatcaaattgtggatggaataacggtatcggatattactcttgaaaccaccaaggtagaagtgaccagcgatcaagaaaccttgagtcgcattgatcatgtcgaagctgtcttcccatccagtgagatcatcagtggaaattatagtggaactctttcattaaatccggtagatgctcaaggagatggtctaccaggtctggtaaatccgagtgaaacacggattaaagtaaccacaaagactagctcgtctacgtcaagctctagcagttcgtcgtcgacctcttccagttcaagtaattagaaagtaaaaaaggtaatgaagaatgggtaaatattttggaacggacggtgtccgtggagaagcaaatgtagaattaacgccagaattggcttttaaactaggccgtttcggtggctatgtgttgagccaacatgaagaagaaacacccttggtatttgttggacgtgatacgcgtatttctggtgaaatgttagagcatgccttaattgctggcctcttatctgttggaattcgcgtctacaagttgggtgtgattgcaacaccaggtgtcgcttatctagttcgtacggaaaaagccagcgccggagtgatgatttctgccagccacaatccagccttggataatggcatcaaattctttggtggtgatggcttcaaattggatgacgatcgcgagcttgaaattgaagccttgcttgatgcggctgaagatacgcttccacgtccaagtgcccaaggtttaggaacggtcatggaatatccagaaggcttgcgtaagtatcaagaattccttgtatcgacaggcgttcaactcgagggcatgcacgtagtcttagatacagcaaatggtgcagcctctactagtgcccgccaaatctttgcagatttgggagctcaattgactgtcatcggtgaaaacccagatggtttgaacatcaatgatggggttggttctactcacccagagcatttgcaagagaaagtcaaagaagtaggtgcagcgattggtcttgcctttgacggagacagcgatcgcttgattgctgtggatgaaaatggagagatcgtagacggcgataagatcatgtacatcatcggttcttatctttcaagcaagggcttgctcgaaaaaaatacgatcgtcacaaccgtcatgtccaatctcggcttccacaaggcattagatgcgaagggaattcaaaaagaaatcacagctgttggagaccgttatgtggtcgaagaaatgcgcaagtctggttacaatcttggtggtgaacaatctggtcacgtagtcatcatggattacaacacaacaggtgatggtcaattaacaggcgttcaattgacaaaaatcatgcaagaaaccggcaagaaattatctgaattggctgctgaagtgaccatttatccacaaaaactggtcaatatccgggttgaaaatagcatgaaagacaaggcgatggaagtacccgctatccgtgaaatcattgaaaaaatggaagcggaaatggcaggaaatggccgcatcctcgtgcgtccaagtggaactgaacccctccttcgtgtgatggcagaagctccaacccatgaagaagtggactactatgtagatactattgctgcagttgttcaagcagaaatcggactttaaccttgtaaaaaacatggctcgcaaataggcgagcagaggaggtatatatgaaacaggttcgtcaaattgtatgggcacttaccttagtgctaacgattctattcacagttggtttgactaaaacaattcatgctgcagaagtctcatcatatacacagacagcacgtctaacgaaagatggtaacacgctaacaaatgggagcaaggtgttgacaaatgaaaaattgtcagcaagtatttatttagcctttccagattcgcaaactattcaagctggggataccttaactcttagtttgccaaaagaattagccctctacacagcactggaattcaatgttcttgaggaaggtcaatcaaatggtcagacggtggggaaagctgtcgttgatacagctaagaaaacagtgaccgttacctttaatgattatttcgcatctcatccactcaacaaacgagttgctcttcattttgatgtaaaagtagactcagaagtagttacaaaaacttctccaatccagtttaaactaggaaatacagatttttcattgaattatgaaaaaactgctggagaagctggagactatgagatgaaatacggttaccaagataagtctgatccaaccattatcaaatggcggattctcttaaatgctcgccaagatatgcttcgtggaatggtcattaaagaccaattcggagatggcttaacattggttgaaggtagcttacgcgctgttcgttatgctcctgtagaaggtgggattaagaacgaagctcagatattaagtctcccagttctggataactttactaaaaaagctgttttcaataagaatgcagatggaaagatcactggttttacaattgaatttggtgataattacaattggccaatgtatattgaatattctacgaaagtggcacctggaacgaaagtaggcgatattgtccataatacattaacatggaaggcaaccaatttcccagcaccgcgtagtttaacccgtgaagtgcgattggaaacaggatctggcgaaggattgggtgagaaagaacaaacgccaccgacacctagctcaacctcctcatcaagttctagttcttcatcaagctcatcatcttcaacgagttctagttcttcatcaagttcatcatcttcaacgagttctggttcttcatcaagttcatcatcttcatcgagttctggttctacatcgaactcaacatccacatcaagttcttcatcgaaatcatcttcatcttctgttaaagaagaagccccaaaacctggtaagaaaaaagttcttccaagtacaggtgaaaagatgacaccggtggttcttgtcatgggtgtcttcctagcagttctatcggttggtattttacgtgtaagaaaagattcctaaatctattcataaaagatcagacctttgtctggtctttttgtgtagactcgatttgaaaaatcccctatttcgtggtaaaatagggctaatgaatttatagtaatcgaggtattagaagtggcttttggagataacggaaaacgtaaaaaaacaccatttgaaatgatcacgatggtcgtcattgtgattatgttgattgtaacggttggtgcaatctttgcaaccgcaattggtgctctttcttactaagacgcacgcagaaataaaggaaatcatctatttatgagtatgtttttagatacagccaagattaaggtcaaggctggaaatggcggcgatggcatggtggcttttcgtcgcgaaaaatatgtccctaatggcggaccttggggtggtgatggaggtcgtggtggcaatgtcatctttgtagtagacgaaggcttgcgtaccttgatggacttccgttataaccgacatttcaaagcccaaaatggggaaaaaggaatgaccaaagggatgcacggacggggagcagaagatctctatgttcgggttcctcaaggaacgaccgtccgagatgctgagacgggcaaggtcattacggacctagttgaaaatggacaagagtacattgtcgcccacggtggccgtggcggacgtggaaacattcgttttgccactcctaaaaatccagccccagagatttctgagaatggggaacctggtcaggaacgcgaactcgaattagaactcaaggtcttggcagacgttggtttggttggcttcccatcagtagggaaatcaactcttctcagtgtcatcacttcagccaaaccaaagattggggcttatcattttacaaccatcgtgccaaacttgggcatggttcggacaccgtcaggtgaatcttttgctgtcgcagaccttcctggattgattgaaggagctagccaaggggtcggactcggaacccagttccttcgtcacatcgagcgcacccgggttatcctgcatgttattgatatgtcagcgagcgaaggacgcgacccttatgaagattatgttcaaatcaataaagagcttgaaacctataatcttcgtttgatggaacgtcctcagattatcgtggcaaataagatggatatgccagagagccaagaaaacttgaaagagttcaagaagaaattggcagccaattacgatgagtttgatgaactgccacagatcttcccgatctctagtttggcgcatcaaggtttggacaacttgttagaagcaacagcagaattgttagacaaaacgccagaattcctcttgtattcagaagacgaaatggcccaagaagaagtctactatggctttgatgaagaccagccagcctttgacatcagtcgggatgacgatgccgcttgggtcttgtctggtgaaaaacttgaaaaactctttaatatgaccaatttcgatcgggatgaagcggtcatgaaatttgctcgtcaattgcgtggaatgggtgttgatgaagctcttcgtgcacgtggggcaaaagatggcgatatcgtccggatcggtaaatttgaatttgagtttgtagattaagggtggtcccgagcggatcaaggattccaaataagaaatgaggctttttcagtgggagataaaccaatatcttttcgagatgaaaatggaaattttgtttcagcagccgatgtttggaatgctgaaaaactagaagaactctttaatacgctaaatcctaagcgcaagttgcgcttacaaagggaaaaattagcaaaagaaaaccagcagaagtaaatagacttggagaatactatggcaaaaacaattcatacagataaagcacccgcagcaattggaccttatgttcaagggaaaatcgtaggcaatcttctctttgcaagcggacaagttcccttgtcacctgaaacaggagaaatcattggtgaaaccatccaagaacaaacagagcaagtcttaaagaatattggggctattttggaagaggccgggacagacttcgaccacgtggtgaaaaccacttgtttcttaagtgatatgaatgactttgtaccttttaatgaggtctataaaacagtctttaccacagagtttccagctcgatctgctgttgaagtagcacgcctgccacgtgatgtgaaggttgaaattgaagttattgcggaaatcaaagcctaataaccattcaaagacaaaaagacagagtggagagcaggaaactgtaggccactctgttttattttgggaggagaaaatgacagaaagtaagattcaactggtcatggtaacggggatgagcggtgcgggcaagaccgttgccatccaatcgtttgaggatttgggttactttaccatcgataatatgccaccggcgctcttgctgaaatttattgagctcatgcgccacagtcccgataacaataaattagccgttgttgtggatatgcggagccgttcttttttcaatgaaattcgcaccattttggatgaattggacaatcaagaagacctggatttcaaagtcttgttcttggatgccactgacagtgagttggtagcacgatacaaggaaacccgtcgtagccatccattagcggcagatggccgtgtcttagatgggattaccctagagcgcgaactcttgtcccctttaaaaaatatcagtcaaaatgtagtggatacgactgagttgacacctcgtaatttgagaaaaacgatcgcagaacaatttgccagtcaagataatcagccagattttcgggttgaggtcatgtcatttgggtttaaatatggccttccgatcgatgctgaccttgtctttgacgtgcgtttccttccaaatccctactacaaattggaacttcggaatttaaccggtcaagatccagctgtctatgattacgtcatggatcaccctgaatcagaggacttttatcgtcacctccatgacttgatcgttcctattttaccgtcttataaacgggagggtaaatccgttctcaccattgctatgggatgtaccggtgggcaacaccgttcagtagcctttgcagagcgcttagcgcatgatttagaaaaaaattggcaggtcaattgcagtcatagagataaggacagacggaaagaaacggtgaatcgctcatgagaaaacctaaagtaaccgttattggaggaggaacagggatttctgttatcctcgatagtctgagaaagaaaccggtcgatattactgccatcgtaaccgttgcagatgatggcgggagttcaggtgaattgcggaagaacatccaaaaattgacaccacctggagatcttcgaaatgtgctggttgccatgtcagatatgcctcgtttttatgagaaggtctttcaataccgctttgcagacgatgatggacctttggccggacaccctttgggaaacttgatcattgcagggatttcagagatgcaaggctcgacctataatgccatgcagttgttaactaaattcttccatacgactggcaagatctatccttccagtgatagtcccttgacccttcatgccgtctttcaagatggaaaagaagtggtaggagaaagccacattgccaactacaccggcatgattgatcatgtttatgtgaccaatacctttgatcaagagcgcccaaaagctagtaagaaagtggtggaagctattcttgaaagtgatatggtcgtcttaggtcctggttcgctctttacctcgattcttcctaatttgatgatcgatgagattgggaaagccatccttgaaaccaaggcccaagtagcctatgtgtgtaatatcatgacccaaagaggagaaaccgagcatttcacagatagtgaccacgttgccgttcttcataaacatttgggagagaagttcatcgataccgtccttgtcaatatcaatcaggttccggcagcttacatgaacagcaataaatttgatgaatacttggtgcaggtagagcacgattttaaggggttgcactcgcaagttccccaagtgatttcttctgatttcttaaagttggtcaatggaggagcctttcatgatggtgaaaaagtagtcgaagagttgatgcagatcgtgcaggtgagaaaatgagttttacggttcgtgtaaaagaagaattattgtctctcaagcgatttgaaaagagtgaattggctgccattatcaagatgtctggaagtcttgggatttcaatggggggcttgacgctctcggtaacaacagaaaatgccaagatcgctcgccatatctatgaattgttgcatcatttttatgaggccaaatcggatattcgccaccaccaaaaaaccaatttgaaaaaaaatcgtgtttacacagtattcttggatgaaaaggtggaagagattcttgctgacttgcatttggcagatgccttttttgggattgagacaggcattgatgccagtgttttagaagatgaagtagccagtcgtgcttatcttcggggggcttttctgtcgagtggttccatcaaggatcctgaaaaagggaagtaccagttggaaattcattctgtttatacagaccacgcggaaggaattgcccttctcatgcaaggatttttactagatgcgaaaaccatcgagcggaaaaaaggagtggtgacctatctgcaacgagcggaagatattattgattttctaattgtggtagaggccatgcaagccatgcaggaatttgagtccatcaaggtcatgagagagacgcgcaatgacctcaatcgggccaataatgccgaaatggccaatatccagcgcacagtcacagccagtatgaaaaccattaataatattagtaaaattgtggatacaatcggtctaggaagtttaccaagtgatctgcaagaagttgcctatatccggatgaaccatccagattattccatccagcagatcgcagatagcttgcaacaacctatttcaaaaagcggtgtcaatcaccgcttgcgtaagatcaataagatcgcagacgatttagacaaataaaaaaggccaaaggccttttttattataaactagttgagtgcgttggttggactttcttatctggatagatgtagttgatggcattgtttacggctgttggagcttccccaagacctgtagcgatgagatcaatctttccttcgtagaagcagcagtctccacaggcataaattccaggaaggctggtttcttgtttttggttcaccttgattttatggcgttgcaattctacaccccattctttcaagtttccgatagaagatttaaagccatagttgacaaataagtgatcaatcgggataagttcggtttcatcggatttaacttttgtgatttcaagatgagtggcatgaccattttcgccaatcaagcggctaggaacaaatggtgttttgatgctgacagaagattgtttgagttcttcaacgctatgttccaaggcacggaagttgtcccgacggtgaatgattgtagttggagcaatcttgtcaaaagcaagagcccagtccacagcagagtccccaccaccaaggacggtcacttgctgtccttcatattgttggatatttgatacgtggtagtggacattatcgaagtcttcagccccctcgatatcaagagcacgtggtttaaaggcaccgccacccatggcaatgatgacggctttagactgatgcacttggcgagaagtagtgatagtgaagaggtcaccctctttttgaatatcctctacagtttcattgaggaagatcggtgtatcgaatcgtttgacttgctcgatcaagcggtcgcttaattcttcacctgttaaattggtaaaaccgggtacatcgaggatatttttttctggatagagaatggctggttgccctccaagttgaggtaaggaatcaatcagtttgactttaacttggcgcatattgccataaaaagcagcaaacagaccaactggtccgcccccaacaatcgtaatatcataaatttctgacatggtatctccttcagggttttctatgtttccattgtatcataaaataggaagaatgaaaaagtcggaaaaaagaaatggcatgaaggctaggaaggctagaaaagtttcaaaagatcttgacagcatctttaaagtgtgataaaataattaagattttaggcttgaagggagtgaaaaatatgtcaaaaacagtagtacgtaagaatgaatctcttgacgatgctcttcgtcgtttcaaacgtgcggttactaaagctggtactcttcaagaaacacgcaaacgtgaattctatgaaaaaccttctgtaaaacgtaaacgtaaatcagaagcagctcgtaaacgtaaaaaattctaattgaatacagaaacagacttcggtctgttttttgttttttctcatccatcaaagacaaaaaaaccgaccttctaactagaagatcggatctttttatctgattatttgtttgcaagcaagtcgcggatttcagtaagcaactcttcttgagtaggagcagcagcttcttcttcgacagcttcttcttttttaccaaggttttgtgctttttcagcagctttcactacgaagaaaagaacagtaccaacaacaaggaagttgatcacagcgctcaagaagctaccgtatgcaacaccgttccatgacaaattagcaatcttatcaacaccagcagctttcatagctggtttcaaaataagtggagtgatgatatcgttaacaagtgatgttacgatagctccaaatgcagctccgataacgactgctacagcaaggtcaacaatattcccacgaaggagaaaagctttcaaatcttttaacatatcctaaatatgtcctttcataataattttttactatgatagtataacggaaaaatattcgactgacaaggaatatgcctcattttttaaaattagtgataaaggttgaaaatcttttcttttatgtgtgaaatcggtaggaaaaaatttacttttactaacttttagtataaaatataaagtgatgatctatggtaaaatggaggcactgtttatggttgataaagagctaattgcagaaattaaaaacagtgtaaacattgttgaagttattggagaagttgtttctttgaccaaggctggccgtaactttttaggcctatgtccttttcatggtgaaaagaatccttcctttaatgtcgttgaagacaagcagttttaccattgtttcggatgtggtcgctctggagatgtttttaagtttattgaagactaccgtggagtcgcctttatggatgcggtccagatcgtagcagacaaggctggcattgcgcttcagtaccaggcaaggccggcccaaccagcgtctgtcaatccaaaccaagaactttatgagattcatcaggaagctagtaagttttatcaggcgattttgatgacgaccaagatgggggaagaagcgcgaaactatctgcatgaacggggtctgacggatgaggtgatccgacattttcaattgggcttagcacctgcagaaggaaattatctctatcgaaatctctctgagaaattctctgagaaagtcattaccgattcaggtttgtttacaatctcagatgctggaacggtttttgatgcctttcaggatcggatcatgtttcccctgacggatgatagtggacgggtcattgccttttctggtaggctgtggaaaatgacggaggatggtagtcatcaagccaagtacaagaatagtcgtagtacccgtctatttaataaaagttatgaactctatcatttggatcaagccaaaacgagcgccaaaaagaaacatgaaatgtatatcatggaaggctttatggatgtcattgcagcttatcgagctgggatagaaaatgcagtcgcctctatggggacagccttgacaccagagcatgtccagcacctgtctcattttactaaaaaggtcatcttgacctatgatggagataaggcagggcttgaagcaacagctaaggccttggatgtcttgcaggatctggagttggagatcgtccgtatcccagatcagatggaccctgatgagtacctcaaaaagacgtccccagaagatctagctaccctcttgaagaattctcggatcagtaaggttgaattcttgatgcactactggaaaccccagtatattgagaacttgcaagcgcaaattgagtttgtcgaaaagttggcaccgatgatcgctcagacgcgttctattacagcgcaaaacacctatatttataagttggccgatttattgccggactttgattacttgcagattgagcagattgtcaataatagtcgcttgcatcaacggcaagaagcgcaagaaggtggacgatcaaaaacgtcgaatttttcagtggagctcctgccgaatcgtgggatgacgcgcttgatcaaggcggaaaatcatttattaagtaggatgaaggattttccaatggtcctcaatgattaccgtttgcgacctgattttaccttcgacacgccggagttacagatcttgtatcaattgctctgtcaaaatggagaagtcacctctcaggatctatccgagcagcctgaaggggtccagcacgcctggtaccgcatgttagaagaagatttaccagatgagatagcagatggtgagttagaagaagtagaagcgacacggaatcgtgagcttcttcgcaaagaaagtcaacaaattggaaataaagtgaaggaagcttcctcaataggggatgcggaaaaggctttattggaactcgagcgtttaatcgctcaaaaaagaagaatggagtaagaatggctaaagaacaaaaagatattacaacattggacgttcaaattgcagaatttattcgcagccacaagaaaagcggaactgcaacagatgatgaaattaatgaccaattggttattccattcacgctagatgcagatgggattgaagatcttttgcaacgcattcaagatgcagggatttcgatcactgataaagacggcaacccaagtgcgcgtgtgttgaacaatgaggaagagccagagttgtcagatgaggaattgcttggaagcaactctgctaaggtcaatgacccggtacggatgtacttgaaagaaattggggttgttcctcttttgaccaatgaagaagaacaagaattggctatcttggtggaacaaggtgacttggaagctaagcaacgtctagcagaagccaaccttcgtttggttgtatccattgcgaaacgttacgttggtcgtgggatgcaatttttggatttgatccaagaaggaaacatgggcttgatgaaggcggttgataagtttgactataccaaagggttcaagttctctacttatgctacttggtggatccgtcaggccatcactcgtgccattgcagaccaagcgcgtaccattcggattcctgttcacatggtggaaaccattaacaagttggttcgtgagcaacgcaatctcttgcaagaattgggacaagatccaacacctgaacaaatcgctgaacgtatggatatgacaccagacaaggtgcgtgaaatcttgaagattgctcaagagcctgtttctcttgaaactccaatcggagaagaagacgatagccatttgggagatttcatcgaagacgaagtgattgaaaatccagtagactacaccactcgtgtggttctacgtgaacaattggatgaagtcctcgataccctgacagaccgggaagaaaatgttttgcgtcttcgttttggtctggatgatggaaaaatgcggaccttggaagatgtggggaaagtcttcaatgtgacccgtgaacggatccgtcagatcgaagccaaagccctccgcaaactccgccacccaagcagaagcaaaccattgcgtgactttatagaggattaaaaagatcctgcggatctttttaacggtcgcctagaaatgaagaagcgacccagatcctgcggatctttttaacccgagccaagaaattcggaagcgaggaaggtccgggggacctttttaacggtcgcctagaaatgtaaaagcgacccaggtccgggggacctttttaacccgagccaagaaattctatcgagagtaaatagcagaaaaaggaagtcatatggcatatacaactgagcaaattgaagaaattaaaaataaaattttaaatgctttggaagaggtaatcgatcctgagcttgggattgatattgtcaatttaggtcttgtctacgagatccattttgacggtgaaactggagcaaccatcattgatatgactctaacgaccatgggatgtccattagcggaccttctgacagatcagattcatgatgttttagcagaagtagaagaagtgacatctgtggatgtgaagttggtctggtaccctgcttggacggttgaaaagatgagccgttatgcacggatcgcacttggaattagttaaacattctatgcatcaaaataaatcagaggttggggtttccctaacctctgatttatttatccctatttttttgaacaagtatttacaaattcttagcaaattttcagataaagttgcaatcatcaaggggacagggtataatagcataaatagaaaataaaggagatttacatgaatcagtatcctttggtctacttggaccatgtgacaaagaattatgggcatgaagttgctctcatggatgttagtttgaacatccaacctggccgtattattggccttttgggtcccaatggtagtgggaaaacaaccatcattaaattgattaatggtttgttgcaaccaagccttggaaatatctatattcatgggcaattaccatccccagcttctaaaaaagtggtttcctatttgccagatacaacttatctgaatgaaaatatgaaaattattgatgctattaactatttccaagatttttatgcagattttaatgtccaacgagcttaccaattgctcaacgatttgcatttgcagccaaatcaaaaattgaacagcctttcaaaagggaacaaggaaaaagtgcaattgattttggtgatgagccgtgaagctgacttgtatgttcttgatgaaccaatcggtggggttgacccagcagcgcgtgattatattttgcggaccattattcaaaacagacgtccaaactcttctgtcttgatttctactcacttgattgcggatattgagcaagttttggatgaggccattttcatcaaccaaggaagaatcctcttgcatgaaaatacgactgttatgcgcaatcaacacggaaaatcaatcgatgagatcttccgtgatcaattccgtgtttattaggaggaacccatgtttggtaaattattaaaatatgaatttaaatcgacagctaagtggtatttattgatcaccctgatcgcactaggtttgtcagtgattacaggtgttattggtggaagtgctacaaacggttttgtgaatatggaaaccaatagtatgcaaatcataacggggactcttgggattctcatttttggaggagtcattggtctttatcttagtaactactatattattatccgtcgtttctattccaacttatacggacgcgaaggttacttgacctggacccttccagctagcccgcatgcgatcattttatctaaatttgtgggagctttagtagcgagtctttactgcctattccttctatttttgagtggttttatcacaatacttgtgatgggcgctgtcattggacaagacctctctcctgtatttagtattatcgctgaggcttttagtcattcaattgcttattggattatcgtttggtggatttttaccacagcttcagggatcttcctattttatgtatcgatcgcacttggccaactcttccaaaatcgtcgtggattgaaggctattctgtttttctttctcttgtgccttgttttaagtatcatcggtacagcagtcaatccattaaaagattcatatgctgttgggtctgcattggtttatggaaatattgatgaatttggacctaacttcatcccaggtcttatctatgaagtcatcaagattgtttctatgtacttcacgattcactatatcagcaagtacaagttgaatcttcaataagaacagttaattgaacaaggagcttcccggtggaagccttcttgttcaatttttttcttttgcatttttggctacattttgatatactaattgtattcgttttggggtcgttacggattcgacaggcattatgaggcatattttgcaactcatctagcggatgtaaaacgccagttaaatataactgcaaaaaataataattcttacgctttagctgcctaaacaccagcatgcgtgacccgattcgaatcgctcgtgtttgatgacaggtcttaattatagcgagatacgatctagcttggtctaggagttagataagagattgatagactcgcaggtacagggcttgagttatgtgtcatgtagctgttaaactaagacataacctatggttgtagacaaatatgctggcaggtgtttggacgtgggttcgactcccaccggctccatatttttattcatggaagattactcaagaggcttaagaggccgtgttggaaacgcggtaggcgtgtaaaagcgtgcgtgggttcgaatcccatgtcttccgttgttgagacatcattgtgtagcagtggtgtttttttgtacaataaagagtcccaaaaatagacaagtgagggaggagaaaaagtgattgcacagctagataccaaatcagtctatacctttatggaaagccttgtgactataaaagactatgtccaagtggctaaaagcatggggtatggcgcattgggaatcatggatatagataatttatatggtgcttatgaatttatcgaagcctgtcaggcccacaagctcagccccttggtcggtttagaaattggactagaggtagacaatgaaacaattccgtttcggatgatcgctctgtcaacgaagggctaccagaatctgatgaagatgtcgaccgtcaaaatgatggggaagagcaattgggaggatgtgaagcacctaacagaaggcgtagcagttattgtcccagctccttttgctagtgtagacttgccgcttggtctagattacttcatcggagtttttgcggatacgccggtccaagagtttagccaccctgtgctccctcttcatactgtgcgtttctttgaggtggaagatgtggaagccatgcagatgctggcagccatcaaggacaatcaaagcttgacagaaacaggaccgattgaccctacaacagtcctaaaaactcctcaggatttaaagagtgattttgcagagcgatttcctcaagccatcacaaatctggaaaaactagtccaagggattcaatacgatattgatactcagttgaaattgcctcgcttcaatcctcagaaaccagcagttgaggaactgagagaattagcccaagcgggtcttcttcgaaagaacttgaccagtccggtctatcaagaacgtctggagcatgaattagacattattcaccaaatgggctttgatgattatttcttgattgtctgggaccttcttcgttttggacggagtcaaggctattatatggggatgggacgtgggtcagctgtaggctcactggtagcctattccctagggattacagggattgatcctgtggagaagaacctcctctttgagcgctttttaaatgtggagcgctacaccatgccggatattgatattgatattcctgatatctatcgtccagaatttattcgctatgtgagagaccgttacgggagttaccatgcagctcagatcgtgaccttttcaacatttggggccaaacaagccattcgagatgtcttcaaacgttttggggtaccagagtacgaattgacctccattaccaagcggattgggtttagggatacactgacgacagcttatgaacagaatatagcttttcgacaagtgattcatagccgagcagaatttgagcgtggctttgaaattgctaaaagaattgaaggccaacctagacagacctcgatccacgcagctggggttgtgatgagtgaccaggatttgacggagcacattcctctcaagtatggagaagacatgtttgtcacccagtatgatgcccatgcggttgaagccaatggtctgttgaagatggactttttgggtctgcgaaatttaaccttcgttcagaaaatgaaggaagcggtctatgaaaagtaccaagaagagatcgtgattgaagccattgatttagaagatccaggaaccttggccttgtttgctgctggggataccaaggggattttccaatttgaacaggctggagccattcgcctcttgagacgagtgagacccaatcatttcgaagaagtggtagcgaccacctctctcaatcgtccaggggctagtgattacattgataatttcgtcaaaagaaagcacggccaggaaaaagttgagattttagatccagctattgaagaaatcttaaggcccacttatgggatcatgctctaccaagagcaggtcatgcaggttgcccagcgttttgcaggctttagtctagggaaagccgatattttacgtcgggctatgggcaaaaaaaatgcagctgaaatgcatcagatggaagacgattttgtctcaggtgctcttaaacttgggcatacggaagaaaaagccaaagaggtctttgcgatcatggaaaaattcgcaggctatgggtttaaccgctcccatgcctatgcctattctgccttggcctttcagatggcctatttcaaggtccattatccagatgttttctttgatgtcatgctcaattattcgagcagcgattatctgacagatgctctccagtttgattttaaagtcgcgccattatccatcaacaccatcccttacagagataagttccaggatcgaaaaatctacttgggaatgaaaaatatcaagggactcccaagagatttagcgtattggatcattgataatcgcccctttgaaagtgtcgaagattttattttacgactccccaatcagtatcataaattacctctgttaacacctttagtggagcttggattgtttgatatttttgaaaaaaataggcgcaaggtgcttcacaatttaccgaatttgtttgtctttgccgatgagttaggcagtttatttgcggattctaactattcctggacagaagcggaggactttagccaggctgaaaaataccagaaggaagaggccattattggcgtcggtctcagtactcacccattggttgcgattgggcaaacgagtccctacgagatccaaccaatttctcaactcatacaaggagagcaggcacgcattctcattgaggtacaaaacattcgaacgattcgaaccaagtcgggcgatctcatggctttcttacaagtcagtgataccaagaaaaaattggatgtgacccttttccctgaaacctacaatcgattttcctccttgataaaagaaggcggcttttattacttgacagggaagatacaagagcgtgatgggcgcttgcagatgattctagcagaggcgcaactggcaaccaatgaaaagttctggatccagttgctcgatcatcgtcaggataaaacgattctttctatcttgaaaaaatatccgggaccataccctgtgatattacgctatgaagacgagaaaaaaactcttcaattgaagggctatacagtccagaaaaacaaagaattagaagatgaattaaagaatctcgttatgaaaacgatttatcggtaaaaactacgaaaaatacgagaattttagtcttctttgtgttataattacttagaatgtaaaagaaaaaaaggagcaaacaacgaaatgaaacgtattgctgttttaactagtggtggagatgcccctggtatgaatgctgccatccgtgcagttgttcgtcaagcaatttcagaaggaatggaagttttcggtatctatgatggatatgcgggaatggttgctggtaaaattcagccccttgacgcctcatctgttggagatattatttcccgtggtggtaccttccttcattcagctcgttaccctgaattcgcacaacgcgaaggtcaattaaaagggatcgagcaattgaagaaacacgggatcgaaggtgttgtcgttattggtggagatggttcttaccatggtgcgatgcgcttgactgagcttggattcccagctgtgggtcttcctggtacgatcgacaacgatatcgtaggaactgactttacaattggttttgatacggcagtcacaactgcaatggacgcgatcgataagatccgtgatacttcatctagtcaccaccgtactttcgtaattgaagttatgggacgtaatgctggagatatcgctctttgggcagggattgcatctggtgcagatgaaatcatcatccctgaagaaggattcaagatcgaagaagttgttgagagcatcaaagaaggttacgcaaaaggtcgtacccacaacatcattatcttggctgaaggcgtgatgtctgcagatgaatttggccaagcgttgaaagaagctggtgatgaaagtgaccttcgtgtgactgagcttggtcacatccaacgtggtggttcacctacagcgcgtgaccgtgttcttgcttcacgtatgggagcacacgctgttaaattgttgaaacaaggaatcggtggtgtagccgttggtatccgtaatgaaaaaatggtggaaaacccaatccttggtaaagcagaagaaggagccctctttagcttgacagaagatggtaagattgtggtaaacaatccacataaagctgatcttggtcttgccgagttgaaccgtagcttgtcttcaatttaattttatttcataaattcgttaaccttgtcttaaaaagacagatatatttaaaaaggagtcatatatatcatgaacaaacgtgtaaaaatcgttgcaactttgggtcctgcggtagaaatccgtggtggtaaaaaatttggtgaagatggatactgggctgaaaaactggacgttgaagcttcagcacaaaacattgctaaattgatcgaagctggcgctaacactttccgtttcaacttctcacacggtgaccaccaagaacaaggtgaacgtatggcgactgttaaacgtgcagaagaaatcgctggtaaaaaagttggtttccttcttgatactaaaggtccagaaatccgtactgaattgttcgaaggcgaagctaaagagtactcatacaaaactggtgaacgtattcgcgttgctacaaaacaaggcatcaaatcaactcgtgacgttatcgcattgaacgttgctggtgcgcttgacatctttgatgacgttgaagttggacaccaagtattggttgatgatggtaaattgggtcttcgcgttgtagaaaaagatgctgcaaagcgtgaatttgttgttgaagttgaaaacgacggtatcattgctaaacaaaaaggtgtgaacatccctaacactaagattcctttcccagcacttgctgaacgcgataacgacgatatccgcttcggtttggaacaaggtatcaacttcatcgcgatctcattcgtacgtactgcaaaagacgtaaatgaagttcgtgcaatttgtgaagaaactggtaacggtcacgttcaattgtttgcgaagatcgaaaaccaacaaggtatcgataatttagatgaaatcattgaagctgcagacggtattatgattgctcgtggtgacatgggtatcgaagtaccatttgaaatggttccagtttaccaaaaaatgattatcactaaagtgaatgctgctggtaaagttgttatcactgcaacaaacatgcttgaaacaatgactgaaaaaccacgtgcaactcgttctgaagtatctgacgttttcaacgctgttatcgatggtactgatgctacaatgctttcaggtgaatctgcaaacggtaaatacccacttgagtcagttacaacaatggctacaattgacaagaacgctcaaactcttcttaaagaatatggacgtttgaactcagattcatttgaacgtaactctaagacagaagttatggcttcagctgttaaagatgctacaaactcaatggacatcaaattggttgtaactcttactaagactggtcacacagcacgtttgatttctaaataccgtccaaatgctgatatcttggcattgacatttgacgaattgacagaacgtggattgatgttgaactggggtgttatcccaatgttgacagaagctccatcatcaactgatgacatgtttgaaattgctgaacgcaaagcagttgaagctggtcttgtacaatctggtgatgatatcgttatcgttgcaggtgtaccacttggtgaagcagttcgtacaaacacaatgcgtatccgtacagtacgttaatagacagtttgatcttaaagccttgctggttggtccgaaaggatcggccgcgaggtttttctttttcttctgtagtgtgttgataagaattctcactaatgcttactttctcttttttaaagatcaaaaacatggtataataaataaaaaggaagggagacatacatgccaaggagagatttaattagaaatgtcatcattgttggtgtactggttttggcactgattttgcttcgaatttttgtatttcatccatttagtatcaatgataaaatggccaatgcttctgtgaaaactggagatcttgtgatagcgactagaaatgctcaggtagatcgcagtgacttggtcttatacaaggtcggtggaaaagaataccttggacgtgtcattgccaaagaaaacgatgaagtcagctacgtagatgacgtcctctatttgaatggacaggcaacaccagaaccttacctaaataaaatgctgaataaacacttggcggctccaacgagtaatgggtattatacggatgatttcttcttatcagagttaaaagggaccaaggctggtcgtgtaccatccgatacttatctagtcttaaatgataaccgtggagatacagaagatagccgtgagtttggttatatccataaaaatcagatcgaaggagtcgtgaatctgcgtctctatcccctcaataaatttggatttataaaagtggaagaatagccgaaaggctattttttttataaatatcaaagagaaacgattagatgcccagaccggatcgtctggctatatggattttgaagccaatcctaaaatcttgaaaaataagatcaaaaatcaaaaggctacccaataccagagtttcaacgaggtgctgatcgatcttcagaatgatcggatcgatggcctcttaatcgaccgtgtctatgccaactattatctgcagacggaaggaattttaaaagactacaatgtctttcctgtcgggtttgagacagaatcctttgcggtaggggtgcgcaaggcggataaaaccttgaagaaaaaaattgatgaagccttcgtaaaactctatcaaaagggccagttccaaaagatctctaagaagtggttcggaacggatgtagcaacagacgatatcaagtaaaaagtgagtgggacagaaatcggtaattcgttagaattcgatttcgtcgtcccacctccgcacagttgagtagggctgtaaaagctgatgaaatcagcgtagtagagcccactcaaccactgcgtcttgctcgacaatcctaaaacaatcaagaggctaggacttctgtcccagcctcttttagtcggttttattagtgatttgatggaaaatcttttgccaagtttcgtggcgacgccagagactggtatggatttgaccgtctagttcatagcgtatgagtttggttttttgactgatggactccagttcaaagttttggaattgaacttggtcgcttgcgagagcctctattaattctgccttgttgtgttcgtgaccggtatcgtcaatcaaggtataattatccgctagcaatgtatcaaactcttgcttagcatagaggcgtttttcgtaggttaagagtttcttttcaacgttttcgatcagctcatcttcaggaattgagctaggttctacatggacgtcaatatcaaagactccaaattcttctttcaggagatcctcgacttcttctgtgatcgcatggctttcatagacggaaaggtcgggattcatctccaagacaacgtccagatagatattgcttccgtaggtccgtccgcgttggtatttcacacgcgcaatcttagggagttttaaaatagctttttcgtaatcttcgaggagactatcgtcaaagccgtctgaaagactaaaggaagattccataaaaatatcgtaggctgttttgaggataaagaaggtgatgatgatggctactattttatcgacaattggatagttaaaagcactagcagcgatcgcgatcgacgttccaagagatgtgacgacgtctgaaagattgtcttttgcggctgcttttaaggcttttgatttggcccgttttgctatgcgaagattgtagaaataaacacctagcatgacaagagctgaaaccactccgacaccagcaccgagtggatcaatgctaactgtttcattgctgaagatcttttggagggtatcgcgtaagacatcaaaaccgacataaaacatgatgatggaggtgactagactagctagatcctcaattttccagtgaccaaacttgtgatcacggtcagctggttggcgagcgagacgaatcccgatgagcagggcagcattgctgataatatctgataagttgttaaatccatcggctaccaaactagaggagtgaagcagatggccagtagctaattttgctgaagaaagtagtaaataggctaaaatactgatgatagcaccacgttcggccagttttaagttactgtatggtttttccaaaatttcctcctacaacctcggatatgaacctgttttctttaagctactattatatcgtttttggaagggaaattcaaatgagtccttttttaaaagaagctaggcaggtttttgtggtataatagaacgattgaatgaatgaggagtatgagatgaatcctttattgaatggtatgaatgatcgccaagcagaggcggtccaaacgacagaaggtcccctcttgatcatggcgggggctggttctggtaagacacgtgtcttgacccaccgcatcgcttacttgatcgatgaaaaaatggtcaatccttggaatattttggccattacctttaccaataaagccgctcgggagatgaaggagcgggcttatcaattgaatccagccacccaagattgcttgattgccaccttccactccatgtgtgtgcgcatccttcgccgagatgcggatcacattggctacaatcgtaactttaccattgtcgatccaggtgagcaacggaccttgatgaagcggatcttgaagtccttaaatttggatcctaagaaatggaatgaacggaccatcttggggactatttccaatgctaaaaatgacctgatcgatgaagtggcctatgctgcacaagcgggagatatgtatactcagatcgtcgccaagtgttatgaggcttaccaaaaggaactccggcagtcagaagcggtagactttgatgatttgatcatgctgaccttacgtctttttgatcagcatccagatgtgctgacctattaccagcagaagttccaatatatccacgtggatgagtaccaagataccaaccatgcccaataccaattggtcaaactcttggcttcacgttttaaaaatatctgtgtcgttggggatgcggaccagtctatttatggctggcgtggagcagatatgcagaatatcctggactttgagaaggattataaggaagctaaggtcgtcctcctagaagagaattaccgctcgactaagacgattttgcaagcagccaatgatgtcatcaaaaacaatcgccaccgccgtccgaagaatctctggacacaaaatgaagacggggaagaaattgtctattacagggctaatgatgagcaggatgaagctgtctttgttgctaaaacgattgaagagcttagtcgcgaagctggctacaaacaccgtgattttgcggttctctaccggaccaatgcccagtcacggaccattgaagaagcgctactcaagtctaacattccctacaccatggtagggggcaccaagttctacagccggaaggaaattcgggatgtcattgcttatctgaacttgattgccaacctcagtgacaatatcagttttgagcgtattatcaatgaacccaagaggggaatcgggccaggtacagtggataagattcgcgattttgctcaaatgcaagagtcctcgctcctggatgcttcagccaacatcatgctgtcaggcatcaaaggaaaggctgcccaagccatctgggactttgccaatctcatttttgatttgagagaaagattggaccagctgaccattacagagttggtcgaagaagtccttgacaagacaggttatatgacggccctaaccaatcagggaaatttggaaagtcaggcccgcatcgagaatatccaagagttcctatctgttaccaagaattttgatgaaaatggagagaccgtcgaagacgaatcaggtgtggaaaccttgagtcgtttcttgaacgatttggctttgattgccgatacagatgatggggcccaagaaacttcagaagtcaccttgatgacccttcacgcggctaagggattggagtttccagtcgtcttcttgattgggatggaagaaaatgtctttcctcttagtcgtgcggctgaggatccagatgagttggaagaagagcgtcgcttggcttatgtagggatcacgcgggcagagaaggttctcttcttgaccaatgccaattcacgtttgctctttggacggaccagctacaatcgtccgacgcgtttcatcaatgaaattagctcggatttattggcctatcagggcttagcccgtccagtcaacactagctttaaggcttcttatagtaatggtggcggaactacctttggaaaaggcatgagcttgtcacaagcccttcaagagcgcaagagacaagcagccccaagtgctttgacttcatcaaacctcccctttggcaatagcaaccgttctagcgccaaagaaagcgtcgcatggtccattggcgacattgccattcacaagaagtggggcgaaggaaccgtgcttgaagtatctggtagtggtagtacccaagaactcaagatcaacttcccagaagtgggtctcaaaaaactcttagccagtgtcgctccgattgaaaagaaataaactgaaaccagtaagcctagcttgctggttttgtccttttatcaacttccctttggtgaggacggacggtagcgactcccttttggattccataccttagatttgagccttccgtctcaaatccaccgagcaggagaaatagatttgtttctcctgattttctcacggcgggaagttttaatggtcatcgttctgtttttcaaatcctctcagttactctattcacagtcattaactaaattgtgaagggaaatagtaggagcaagcctcgtttgttggttttgattttactggtggcatgatataatatagtaagaatagagaaagaggcatgctatgaacgaaatcaagtgtcccaactgtggggaagtttttacagtcaatgaaagtcaatacagcgaactcttgtcacaggtacggacagcagagtttgacaaggaaattcatgagcggattcggcaagaattggctttggcagagcaaaaggcccttaatgagcaacaagagaagttagccaagaaggaccaagaaattgcccaattacagaaccaaattcaacagtttgatactgaaaaagaattggctaaaaaagaggtggagcaaaccgctagccaaagcttgctagagaaagaaaaagaagtgcaagcgctggaaaatcaattggccaccttgcgcttggagcatgagaaccaactgcaaaagacgctttctaatttggagaaggagcgtgatcaggtacaaaaccaattgctccttcaagagaaggaaaatgaactgtccctagcttctgttaaacaaaattatgaagcccagctaaaggcggccaatgaacaggtcgagttctacaagaatttcaaggcccaacaatctacaaaagctatcggtgaaagtctggagcagtatgcggaaagtgaattcaacaaggttcgcagttttgccttcccaaatgcctattttgaaaaggacaacaaggtctctgcgcgtgggtctaaaggcgactttatcttccgcgagtgtgatgaaaatggagtggagattatctccattatgtttgagatgaagaatgaagccgacgggaccgaaaagaaacacaaaaatgcggatttctacaaagagttggacaaggaccgtcgagaaaagaactgtgaatatgccgttttggtgaccatgcttgaagcagataacgactacttcaacacaggaattgtcgatgttagccacgagtatgagaagatgtatgtggtccgtcctcagttctttatccagatcattgggctcctgcgcaatgcggccctcaattcccttaaatacaagcaggaattagcgcttgtccgtgaacaaaatatcgatatcacccactttgaagaagacctggatgctttcaaagttgcctttgctaagaactacaactcagcttcagtcaacttcggtaaggccatcgatgaaatcgacaaagccatcaagcgcatggaagaagttaagaagttcttgactacatcagaaaatcaactccgcctcgctaacaacaagttggatgatgtttccgttaaaaaattgactcggaagaatccaaccatgaaggctaaatttgatgccttgaaggaagactaggaggatcctatgcagatacgaaaagcaaccatgaaagatactgaagccctactgtctttatacgaagacttgggctatccaacgaccgcttctaagctgtctcgacgtttagaaatgattctttctcagccacattatggctgtcttctagctgaaagaaacggagaaattttaggtttcttaggttatgcaaaactcttcttttttgaaacagatggatcttactatcgtattttggctttgtcagttgcaaaagaaacaagacgacaaggaattgctagtaggctaatcgatgaattgaaaaaacaagctgtaaaagaaggggttaaggcgctggctctaaatagtggattaaccgctgaacgaaatgctgcacatcagttttatcaggcagttggatttgaaaaagtgactgctggctttgccttgcatttaaaaactcaacatgaataaatcatgaaaaaatagtagagggaacgaagtaatgtcttcaacaaaagggaaaaccttatatttgaacaaaaagagcatggactatgtaacatttggaaaaggtaagcagccattagtgatcataccaggcttgggggatgggcttcagaccgttaaaggaaaggcacagctcttttctctctcgtatcgtctacttgctaaacgttataaaatctatgttttttctcgaatcaatgagctgagacagggctatacgacgtgggatatggcagcagatgtagcagaagcaatggagacactaaacctagataccgcttatgttatggggatttcacaaggtggaatgattgcccaatggctagctgcagattttccagaaaaggttcaaaagctcattttagccgtgaccactgcaaaacctagtcaacttgctagagaacgaattgagcattggcaaaaacttagtcaatctggaaattttaagcatctcatgctggatattgcaaagcattcctacacgcaaaagagctatcaaaagtggcggttgctttataatatcatgggtcgcttggggcgaatcaaagatgaaaatagaatagccattcagtctcagtcttgcctggaacataatagccttgaggtcttaaaagaaattcattgtccgaccctgatccttggtgcccttgaagatgatgtggtcggtgtggacggatctaaggaactagcaaaagcgatttcgggttgccagctccttattctaaaacattctgggcatgctctttatgaagaaaataaagtatttcaagaggctgtctgtgaattcttaaactaaaaaagctggaatattttccagcttttttatgttagttaaatcgcaaagagatcatttaggttttctgccatggttgggtgagtaaagatttgttttgcaatgtaagtataagggatcttgttgtccatcgccatggtaatcaggttgatgatttcgcctgcagcttctccaaagagcgtcactccaagaatttctttagtttctgggttgaccacggctttgaaggcacctcgaaggtctgcattgacgtgtccgcgtggcatagcagcaactggcaattctttaacagcaactggaagccctttgtcgcgtgcttcttgctcggtcaagccgacttgggccagtggaggagcaatgaagagtgttgtcgcataattgttacgagtttcgagattgtagctaccatcgcctgtaaggtagttgaagacgatgcggaagtcatcgagtgacatgtaggtgaattgaggaccaccattgacatccccaactgcaaagacaccagggacgctggtttccaaatgacggttgacttggatcgctccacgatcagtgacttggatatctgtgttttcaagaccaagtccagctgtgtttggtttacgtcctgttgcgtagagaaggatatcaaactcgaagtctcccttatctgtgacaaccgttaagctgttttggccatctttgatttcttgggtatgaacgccttgcaagaattgaatgccatcttcttcaaggtagctttttgcaagagctgcaatacttggctcgatccgaggcaagaatgtttcagaagcatccaataccgttacttggctgcccaaggtattatagagatgagcaaattccaatccgataggtccaccaccaaggacacccaggcgtttaggtaggttttccaaacgttgaatgccggttgaatccacggcaaatttactttcagccaaacctggaatcggaaggacatttggcacagcaccagtattaataataatggtttcagctgtcaatccttccttttcatctccagcttgaatttcgatgaccttgttagaaacgaaacgagccgtcgcgtcgataatgtctacgccagttccagcaatggttgcgtagttcttgccgttgagacgagtcgtcactgcatttttctcattcatggcttgctcaaaatccaagcctttttctgctgcaacaatcaaggtcttggttggaatacaagcgatattgatacaagtaccaccgtacatagatttgctcttttcaatcagagcgactttttttccttggcttgataatttcgctgcgagtgttttaccagctttaccaaatccaatcacaataacatcatacattaacatatgttacaccttctttcgctttctattgtatcaaacccattttaaaaagtctgaaatctgctacgggattttttggaagctcatggggagggagaaagagggacaagaagtcttgtttcatgatataataaagggtcggtgtcccggatggtcacacaagagttagaaagagcaaatcagatggacggaattatcaatgtaaaaaaagaagcaggcatgacctcacatgatgtggtctttaaactgcgaaaaatcttaggaactaagaagatcggccatgggggaacgctggatccagatgtggtgggagtgcttccgattgcagttggcaaggcgacccggatggtcgaatttatgcaagatgaaggcaagatctatgaaggagaaatcactttgggattttctaccacgacggaggatgccagcggtgaaatcgtagagcagaccccagtggaagcccctttagatgcagcagaggtcgatcgcatgattgcccaaatggtgggagaaatcgagcaagtaccacctatgtattccgcggtcaaggtcaatggacgtaagctctatgaatatgcgcgggcaggagaagaagtggaacgccctgtccggcaggtaaccatttatgaattcacacgcaccagtgagattggctacgaggaaggtctagcccgttttcgtttccgggtcaaatgcagcaagggcacctatatccggaccttgtctgtggaccttggtcagaaactgggctatgctgcccatatgtctcatctgacacggaccagtgctgccggtttgttactggctgatgccctgaccttggaagaagtggctgaaaaagtagcccaaggagatttgagcttccttcacccacttgaaattggcaccggagatctggaaaaagtagagctgacagtagaagaggttggcgaagtccaagtgggacgctttattccagttgtgagcgaagccaaagagttagctgctttttaccaaggaaaattggtagccattttagaaaaaagagaagaactttacaaacctcgaaaagtctttctaacagaaagtgtgttacaataaattcatgaatattcgtacgataactactgctaaccagatccacttggagaatgagacagttttggttctgggctactttgatggcctgcatctggggcatcaagaactttttaaaaaggcgcgtcagatcgcagatgaaaaaggcttgaaggttgctttgttaaccttccctgaatctcctaagttggcctttgttcgctaccaaccagaattgttactccatttgcaaagccctgaggatcggttccaaaaattaaacgaactaggagtggatgagctctttctcattgattttacgactgattttgcttctaaaacagccaaagaatttgttgatcaatttgtcaaagccttgagagcccgagttttaattgctggatttgattatagttttggctctgataagaaaacagcctctgacttagctacctattttgatggtcaggtggaagtcatttctcctgtattggatcagggggaaaaggtcagttcgacccgcatccgtcaagatgtcctaaaaggacgggtcaaagaagctgcacggttgcttggtcatcccttgtccagtcggggaattgttgtccatggggatgcgcgtggtcggactattggttaccctacagcaaatctagcaccaatcgatcggacctatctaccatccgatggagtctatgtagttgatgtcgattttaaagggcagacctatcggggcatggcttctgtcgggaagaatattacctttgatgggaaggagcttcggtttgaagtcaatctttttgacttttcaggagacatctacggccatacgctgaccattcactggttagataagattcgagaaatggtcaaatttgatgggatagatcaactagtggctcaactagaagaagatgaagcagtttcacgaaactggaccaagaggctgggacaaaagtcatagcctctcaattgtttttggattgtcgagcaagacgcagtggttgagtgggctctactacgctgatttcatcagcttttacagccctactcaactgtgcggaggtgggacgacgaaatcgaattctaacgaattaccgatttctgtcccactctcttttttcgggcctctttttgggaaaaatgaaagggatttcttttttccactgaaattcagaaaaatcgtcgagaaatcaaaaaagcgcttttcaagcacctattttttttgtataatagagtcagatagttatatataaaaaaagaagtgaaccacatgattacattatttttatcaccgagttgtacatcatgtcgaaaagctcgggcttggttaaaaaagcacgatgttccatttaaagaacacaatattatgacaagtcctttgagcaaacaggagttgacaagtatattggccttgaccgaaaacggaacagacgacattatttcaactcgttcaaaaattttccaaaaattggatgttgatgttgaagatttatctatctcagccttgatccgtctgattgaggaaaatccaagtctcttgcggagaccgattattttggataacaaacgtatgcagattggctttaacgaagatgaaattcgggccttcttgccacggagttatcgcaaacaagagttacgctctgccactctaagagcagaaataaactaagaagtatgtcgaatgcaaaaaaattatagttacccactggacttatcgtggagcactgaagagcttgcttcagtgctttcttttttcaataaagttgaagaagcctatgaaagtaaggtagaagtcaaagaatacatggaagcctaccgcgcttttaagaaggtcgtgcctagtatcggagaagaaaagcgtcttggacgggagttcgaagaagtgagcggttattctctctatcgtgcgacccaggctgcaaagcaaaaagaggaaggatggttttctcttgaagaataaattagagtttgccaaacaaatcgttttagaggctggagactacttgcgtcttcatctccatgatgacttgatgatctcaaaaaagactgggccgacagatttagtaacccagatggaccaacaagttcaaaaggatttggttgaaaaaatcacacatcgctacccagaagatcggatttttgcggaagaagatggccttcgctccccaatttcagaagggtccgtttgggtgattgatcctattgatgggaccaataattttgtgacccaaaaggaagattttgcggtgatggtggcctattttgaagacggaattggtcagtttggcctgatctacgatgtgatgcgggatcaccttttttacgggggtggagaattccctgtttatcgcaatgaggttgaactgacgccctttgtggaccagccattggaaaactttctgattgcgtcaaatgtcggtatgcttgagaaaaatgactggggaatggccgatcttggaatggattcactaggaatccgggtctatggcagtgccggtattagtttttcaaaaattctctcaggtggtattttagcttactttagctatatctggccatgggactatgcagccgcagcgatcatgggcgaacggttaggctataccgtcctaaatctaaatggggataaacctaattaccagacagtcgaacccattatgatggttccaaaggtgaagttaacagagattcaaacctatcttaagaaagggagaagttaaatgaattttcccaatggttttaaagaaaaataccagcatcttctaggtgaggatgctgctgctttttttgcgacctttgatcaagatgcagtagcagcctttcgcaccaatcctttgaaagaagcacaaaaagtctttgatgatccgattcccaatactccttggggccattatggaaaggtctcagggaaatccatcgaacacgcaacgggcttggtctattcacaagaaccagcagctcagatagtggcccaagtcgcccagccaaagcctgggatgaaggtcctagacttagccgcagcacctggtggtaagacgacgcaactcttgtcttatttggacaatcaaggactcttggtctccaatgaaatccacaagggacgctcgaaaattctcgtagagaatgtcgaacgcttcggtgcccgaaatgtattggtaaccaatgagtcagccgatcgcctggcaaaagttttctcaggcttttttgatctgattgtattagatgctccttgttcgggtgaggggatgtttcgtaagcaaccagatgccatggactattggtctgtcgattatcctcgagagtgtagtcttcttcaaagagaaattctggaggatgccctcaagatgttggtccaaggtggttccttggtttattcaacctgtacctgggctccagaggaaaatgaagaaattgtatcctggcttttggaaaactatgatctggagctggaaacgatcgagaagatcaatggtatggcagaaggcattgactatccagaaaccgcgcgtatgtatcctcatcgctttaaaggggagggccaatttgtcgctaagtttcgttatctaggagagaattggcctgctaaaatcccttccaaaaaggaccaattatctgctgaacaaaagaaatggtggcaggaatttgctaagaaacatttgaagattactctagaaggggtccttgaaacctttggtgacgagctgtatttggttccacttggtttacctgatttgcgaaaagtaaaaattgcccgaaatggcttgcacctaggaaccttcaagaaaaatcgatttgaacctagttttgcgcttggtctagctctgaaaccgagtgaagtcaaagagaccgtttcgatcacgcctgaggactttgttcattatgtggcgggagaaacagttcaattgaaggaatcgcatccaaatggatggtaccaggtcctggttgaaggcaatggtttgggctttgccaaagtgaccgggcaaaccctgaaaaatttctatccaaaggggcttcgttttaggtaaaatgctgggcaaagaacccgttctatgatatagtggaagtacagttttttttgaaaaaaacttgtcaaaatcataagtgaaatagtgaattatcaaggagacatgatttgaaaaagtctaaaaagctgatcttaggactagcgacgatcgcattagcaggaagtttatctgcttgtgcttcttggatcaatcgcggagaatccatcactgctgttggatccactgccttgcaacccttggttgaaggagtggtagatcgctacattgaagaacatcctggtaagattgtgaatgtacaaggaggaggttctggtacaggactttcacaagttcaatcaggtgctgtggacatcggaaatagtgacctgtttgcagaggaaaagtctgggatcgatgcctctagtctggtcgatcatcaggtagccgtagcagggacagccatcattgccaataaaaatatctcgatcgacaatctgacaacggagcaattgcgaaagatctttacaggtgaatataccaactggaagcagttgggtggtccagatcttgagatcacgattgtgaaccgtgccgtaggttctggtagccgtgctgtctttgatgccattatcatggatggcaaacaacccaagcaggcccaagagcaagactctaatggaatggtgaaaaacatcgtttctcaaactccaggagccatctcttatctagcctttacctacttggatagcagtgtcaaaactatgaagcttaatggctatcaaccaaccaaagccaatgtcgtcaacaataactggcccatctggtcttacgaacatatgtataccaagggaaaacccaatgagttgtctaaaaaattcattgactacatgatgacagatgaggttcagcaaaaagttgttggcaagatgggctatattccaatcaatgatatgaaagtcacccgtgatttaaaagggaatgtgacaaaaaaataaaagaattaggtaaaaaatgaacgaagtagcaaaaaaaatgctgacgaaatcaaaaaactcccgcctagaaaaatttgggaagaccattacctttctatgtatgagtttgattgttgtcgtcgttgccatgattttgattttcgtggcccaaaaaggtttatcgactttctttgttaataaagtcaatatctttagttttctatttgggagctcttggaatcctgctgcaaaggaatttggagccctacccatgattctaggttcctttattgtaaccttgctttctgccctcttggcaacgccgtttgccattggtgcagctgttttcatgacagaagtctcccccaaaggagctcgtttcttgcaaccagcgattgagcttttggtgggaattccttcagttgtttatggattcattggtcttcaagtggtcgtcccatttacgcgtagtctctttggagggacaggttttgggatcctctcaggggtctttgtcctctttgttatgattctaccaactgttacctttatgacgaccgatagcctccgagctgtaccccgtcactaccgggaagctagtatggccatgggagcgacccgctggcaaaccatttggcatgtcacgctcaaggcagcccgctctggaatctttacagcggtcgtctttggaatggcgcgtgccttcggggaagccttggctatccagatggtggtcggaaactctgcagtggtgccaacctcgctcacaacaccagcttccaccctcacctctattttgaccatgggaatcggaaataccgtcatgggtacggtcaataacaatgttctttggtcactcgccttggtattgctcctcatgagtcttgcctttaacagtgtgattaaactgattacgaaagaaagaggtaagaagaactatgcacgctaaacgaatggataaaattgcaacaggagtactgtatgctatttcagggatcatcgttgcgattcttgcctcattgatcctttatatcttggtccgtggcttgccccatgtatcctggcacttcttgactgggaaatcctcttcttatcaagcaggaggagggatcggaattcaattgtataattcctttttcctcttagtcattaccttggtgatttccttcccactttctcttggggctgggatttacctttctgagtacgctaaaaaagggcgcttgaccaatttggttcgtacctgtattgagatcttgtcttccttgccatctgtcgttgtaggtctctttggttacttggtctttgttgtccagttcaaatatggattttcgatcatttcaggggctttggccttgaccgtctttaacctgccccagatgacccgcaatatcgaagatagcttgcagcacgtccatcatacgcagcgcgaagcaggtttagcactgggcttgtctcgctgggaaaccgtgattcatgtcgtggtaccggaggctcttccaagcattattactggggttgtattggcatcaggacggatctttggggaagccgctgccttgatctatacagcaggtcaatcggctccagctcttgattggtcaaactggaacatctttagtgtgacgagtccgatttcgatcttccgtcaggctgaaaccttggccgtccatatctggaaggtcaacagtgaaggaactattccagactcgatcgaagtctcagccggttctgccgcagttcttttgatctttatcttgatctttaactttggagcacgcaaactcggaagttacctccataaaaaactaacatctgcttaaaggagaagaaatgtcaaaatacaattgggatgagagacacatcattacttttcctgaagaaaaggtggtcctatcgaccaaagatttgcatgtctattatggaacgaacgagtccattaaaggcgtcgacatgcagtttgaaaagaataagattacagccttgatcggtccttcaggatctgggaaatcaacctacctccgtagtttgaaccggatgaatgataccatcgatattgcgcgtgttacgggtgaaatttggtatgaaggaatcgatgtcaatcgtccagatatcaatgtttatgaaatgcgtaagcatattgggatggttttccaacggcccaatccttttgccaaatcgatttataaaaacatcaccttcccgcatgaacgcgctggggtgaaagataagaagatcttggacgaattggtcgaaacttctttgaaacaggcagctctatgggatcaggtcaaggatgatcttcataaatcagccctgacactttcaggtggtcaacagcaacgactttgtatcgcgcgagccatctctgtgaagccagatatcttactcatggatgagcctgcttcagcgcttgatccgatcgcgacagcgcaattagaagaaaccatgcttgagttgaagaaggattataccattgtcatcgtgacccacagcatgcaacaagcagcccgtgctagcgattataccggtttcttctatcttggaaacctcattgagtacgataagacttcgaatattttccaaaatgcgaaattgcaatcgaccaacgattatgtatcgggtcactttggataaagtaaaatgacaacaaaaaggaaaatagaatgacagaaccaatattgcaagtcaaggacttgtcggtttattacaataaaaagaaggctctaaatagcgtctccttggactttgctccaaaggagattacagccttgattggtccttcaggatcagggaaatctacccttttaaaagccattaaccgcatgggggacctcaaccatgaggtcactaccacaggaaccatcctctacaatggacataatatctatggaccacggaccgatacggtcgaattgcgtaaggaaatcggaatggtcttccaacagcccaatcctttcccaatgtccatttatgataatgtgacctatggattgatgattaatggtgtcaaggacaaggctgtcttggatgaagcagttgaaacctctttgaaacgcgcgtccatctgggatgaagtcaaggatcgcctgcatgattcggcgatcggactttccggtggtcagcaacagcgggtctgtgtggcgcgggttcttgcgaccagtccaaagattattcttttggatgagccaacttcagcgctggacccgatttcagctggtaaaattgaagaaaccttgtatggactaaaagaccgctacaccatgctcttggtgacacgctccatgcaacaagcgagtcggatttccgataaaacagcctttttcttggatggggatttgatcgagtacaatgacaccaatgaaatgttcttgaacccagctaagaaagaaacagaagactatgtctctggtaaatttggataggaagaaaataaaatgttacgagttcaatttgaagaagatttagagaagttgcataaccagttttatgcaatgggaaatgaagtgttgagtcagatcaaccgtacggtccgcgctttcgtgacccatgaccgtgaattggcccgccaagttatcgaagatgacgcggagatcaacgactacgaagtgaagttagagcgcaaatcctttgagattattgcccttcaacagcccgtttcacaagaccttcgtatcgtgatgactgtcttaaaagcggtctccgacttagagcggatgggtgaccacgcagtatcaattgccaaggcaacgattcgcatgaaaggggaagtccgcatccaatctgttgaggaagagatcagcaagatgggccgtgaagtcaaagattttgtcgaagcgacattagatgtttacctcaaaggcgatgtggatttggcctatgaagttgcgacacgagacgaagtcatcaaccattacttcgatagcatccaagaattagcaacagaagaaattcggaaaaatcctgagtccatcgtgaccgggagggattatttccaagtgatcaacttcttggaacgtatcggagattatgcaaaaaacatctgtgaatgggtggtttacttcgaaacaggtaaaattatcgaaatgtaagatcatagagtcttttcgatatcagacaggcattctaatgcttgtcttttcttttatcttgactttgtgataaaatagttttattagggcttttcattggaaagcaagaaacatttaaaggaggaaattatgcaagcagttgcacattttgtagaaacattcgttccagaacattacgaagtgtttttggatttaaatcgtaaaaccaagacctttagcggtcgtgtggtgatcacaggtcaagccaaggcggacaagatctcgcttcaccaaaaggatttgaccatcgaaacagtagaagtagcaggtcaagcccgtccatttacggttgatgatgacaatgaagcagtctatgttgaattggaaggaacaggtcaagtgacagttactctgacctattctggtaagatcacagacaatatgacagggatttacccatcttactacagcattgatggcgtgaagaaggaagtcctctctacccagtttgagagccattttgcgcgtgaagcttttccaagtgtggacgagcctgaagccaaagcaactttcgatctttctttgaaatttgaccaagaagaaggtgaaatcgccctttcaaatatgcctgaaatcgatgtggaaaaccgcaaagaaacaggaatttggaagtttgatacgactccacggatgtcttcttacctccttgcctttgctgctggagatcttcaaggagtgacagctaagaccaagaatggaaccctagtcggtgtctactctaccaaagctcacccattagaaaacttggacttctcattggatattgccgttcgtgctattgaattttatgaagactactatggtgtgaagtatccaatccctcaatcccttcatatcgcccttccagacttctcttcaggagcgatggaaaactggggcttggtaacctaccgtgaagtctaccttctagtagatgaaaactctacggcccaaagccgtcaaacagtagccttggtggtggctcacgaattggctcaccaatggttcggaaacctcgtgaccatgaaatggtgggatgatctctggttgaatgaaagctttgccaatatgatggaatatgtcagcttggatgccattgaaccaagctggaatatctttgaagacttccaaacaactggagtgcctgctgctttgaaacgcgatgctacagatggcgttcaatccgtccatgtggaagtcaaacacccagacgagatcaacactctttttgacccagcaatcgtttacgctaagggtagccgtcttatgcacatgcttcgtcgatggttaggcgatgacgccttccgcaaagggttgaagatctactttgaaaaacaccaatacggcaatactatcggtcgtgacctttgggatgctcttgggcaagcttcaggtcgtgatgtcgcagcctttatggattcttggttggagcaaccaggataccctgttgtttcagcttctgttgaaaacgataccttgatcatccgtcaagagcagttcttcatcggagatagagaagaaaaaggacgcaagtgggttgttccgttaaatagcaactggacgggtattccagataccttggaaactgaagtcttagaaattccaaactacagtgccttgaaagcagctaacagcggagctcttcgcttcaatacagaaaatacagctcactatatcagtgactaccgtggggaattgttggaagacatccttgctgaccttgctagcttggatagcacttcaaaattacaagtggttcaagaacgtcgtcttttagctgaaagtggtcaaatttcttatgcaagcctcttgccagtgattgaacacttgacagaagaaagttcctacttggttgtttcagctgtttcgagcgtcttagctggaatcagtctctttgtggatgaaggaactgaaacagaagctgccttccatgagttgttgaaacgcttgaaccgttacaactttgaacgcttgggtctagaagctaagcctggtgaaacagaagaagacgaaaaagttcgtcagctaatgattgctaatatgatcaaggccaatgatgaagctgcaaaagctcaagcgagcactatctttgaagcacatgcagatgatttggaaaaacttccagctgccatccgcctgcaaatcttggtcaaccaaatcaagcaccaggaaaccaaggagcttagccaacaatacctagatacttatgttaagacaatagatgggaactttaaacgccagttggcggctgcactttcttataccaaggatgaggaaactttggaagctctattgaaggagtggaagaacaaggatgtggtgaaacctcaggacttggctatgagttggtactacaacttcttacacgatgactttacccaaggaagaacttggacttgggcgcgtgaaaactgggattgggtcaagaaagccctcggtggtgatatgagctttgataagtttgttatctacccagctaactgtttcaagacccgtgaacggttgaatgaatacaaggccttctttgaacctcaattggatgatatggcgattagccgcaatatcaagatgggaatcaaggaaatcgccgctcgtatcgatctgatcgaccgtgagaaagcagctgttgaagcagcgcttctagctacaaaataaagaaaaaagctcctagagaaggctctgcagatctgcaaacttctctaagagtctttttatttttcttttttgaaataaggaagatgctgaagatttcgataaaggatgaccgcgaaaatagtttatcaatatcctaatggagtgggaaaaaagtccgcaaaataaaaaaggttgaaaaaagcttccccacaccttttcaatttttccacctgcgtatagttccaacggtctgggagagtgttggaggttgcagatcaaggaaatattgttctccttatcattggagctaaataagcgaacaaagacttggggaacttgcttcacaagttctatcctccacctcaaagtagcggtttaagcaatcaaccactgcgtctcactgttacttctatcaaacatcaaagtctggacagattttgcctagcctcttttttataaattacctgaataaggccttgaaggagaaggatcattagtttattggacttggtaagagaatctccgttcgatagtggccattttctttgaatcgtttgatagttccttggtattcttgtactagggcatcaacgtttcgcaagccccaaccatctctttgacgtgttttacgagtctcttgttcctgttcattaaaggtattgttgatcgaaataaatagattttgttgaaaataacgtatattcagagacaatgttctctctgatttatcagtcaatcgaagacaggctgaaatactattatccaaacaatttcctaaaataacagctagaacatctggctgaatagatagttcttgtgggataaagcagttaatatccaattcaatttcatcttccacatcgtgcagtttttgattcagtaaataattaaccgttggatttttggagtaaaaggtttgttttcctgaaatactatcggttaacgactgaaggtactctctagcctcatcaggattttcttctagaagtgccaagagggttaaatgtttatttttcaagtcatgccgaagactttgcaatcgttggtattcttcttgagactgttgtgtttctcgtaattggaactgaagctgttctttatctaatttattttgataataagcgtgctgttgttgagaaagatgtaaggtaaaatacagcgaggaaaacgacaatacaataagagacaagagtgaaatgacagaaagataatctggtccaaatacttgcccttgaatagctgatacagtaaaggcaaaaataatcgataaaatcggcacgataaatagatacagccaatttcttttagatgttgccatgcctaacttttgatgtgttcggaataactgtcgaagaacaagtgttatgacggttgaaaaaagaaaactaatggcaaggtaaccactaatcagtcctaaatttttcgatacttttgacagtggaagaaaaagttggataacttgattgaggacagctcctgctaataatgtcaggcttgtctgtaagaatatccaaaaggaagaatcacgaaaggagtagccaaaatagagtcctacaagagaggattctacaatactcaggaggagattgctcactaaaaaaacgcgactttctaaaaatataaacacaaaagccacatgaagaagaaagcaacaacaaaggagtaaaagtgtcttttttgattgtttacttttggatattgacctaaaaaataaaacacttgccagaaataagtcgaacaagatactaatgatccgcaatcctattagcattagaaattcctttcactgaggtagttatagtatttttctttaaaagaagactggaacttacgactaattggaagtgaatgctcctcggttccatttagcaaaatagtcactgttttcgcatcaaaatctttgatatatttgggatttacaatataagaagcatgaatttgaataaaataatcaggtagtttatctaaaatgtcttgagttttcagtaaggacttataggtatctgctagcgtgtaaataaaaacggatcgcttatctttctcaaaataggtaatgtcacttaaaggaatagagtaactttgttttccaaatgagaagttaaagatgatttgtcctaaatctagataacgtaaaattctgtctactaccttatttagtctttgaggttcaattggttttactaagtaatcaaaagtctgcacttcaaaaacttgttccatgtaatcacgatagctggtcacaaaaataatggggataaaaggattgaactgccgaatttcacgagcaaggtcaattccagtaatttgtggcatatcaatatccaaaaagacacaatgagtatcccttgttaactgctctaacatcttttgtggattggtatatagttttgtttctacaggaaccttgtcgtaagaaagtaaatactgttctaactgactagcatctctagttgagtcatcacaaataacgacgtttaacataagtcccccttatcaaattgagttggctaattatgacactaaaatggtaaatcatgacgtaaaccttggaaagtcatatgtttattatacaataatcttatcaaaaatgaaggaagctgggaaaatcttctcagtcttgagtgatgagatgaagacatttgcgacactgactattagagatttgacaaaatcatttgataagcaacattttgctaataaccatatttccttagaaatagaagctgctaaaattacagcttttttaggacataatggtgctggtaagtccaccctcttaaatcaaatgattggttttaccaaacccgataaaggagacgtttgctatggagacatttcttttgtacagaatcgtaaacaagctcgctcaatgatgagctatatgtcgcaacagtatgcaccacttgagaaattgacggtggaacaaaacatagaaatgcttggaagaatgagaggattaaacaccttagatttacaaaaagaaatggatcagctcttaaccgacttgaaaattaaggagtaccgggcaaaacaagggaaggatctctcaggcggtttaaagcgtctaacttcttttgcaatggctttaatcggatctccgaccatcattcttcttgatgagcccacgaacgatgttgatccaatacgtcgtgaaaaacaatggcaattattacagaagttggcgcataaagggcataccattattattgtgacacataacttgttggaagttgaaaaatatgcagacaactatgccttatttaaccatgggaagttaatcaaatcaggaccagttcagcaaataacctatcaaaaacagtaccaaatatcttttgagtttaggaatgaagatagcttagctctattccaagattataccattatcaatggttcgatttgccagattgaagtagaagagaaggagttaacaagactgctaccaaaactaacacaggaattggatagaaagaatatttttaatctgtcacttactcataaaaacgtatccatttcagatctttatagagaggagttgacaaactgatatgactcaattcttttacttacttcgttggaactatcttcgtcaaaaagatctatttctactctttacgctagctcaggttctgttatccatttcacttctttttggttatccactagtgatcggtgagattgatacgacagctgcctactatctctcttctggttcagttctgataggaattatttctattggctgtacgatctcatctcctgttatagcaaatgcgaagtcagaaggacatgtagactacgtacgatcccttccaataccacgaattctgatttccttagcggatctttggatgtggatgattgctattttgcctggagtgttcatttctgtcatattgggctattttcgtttctctgtccgcctaaatgtatctgttctggctgttttcatcctatttctgatctgtcttacgatgatcagtcttggatttgccattgcgtatactttttctcccaatattgtaacgttaatgtctcagttaattcttatgattggtttgatgttttctccaatcatgtacccagcaagtcgtcttccagattggataaaccatctctaccatgttcttccatttgtcccttctgtcagcctcctacgagcttgtgtctatagtcatggtcacgtctcattttttgacttcactattctgatcatctggattttgctaacacagttacagatcttgagagttctttataaggaaaaataaaggaaggaggctagatagaaggttcttcttcgaaacagtaatccatttaaaagtagtttaattgaagagatttacaaatgtatgcctataacaaaaatcaacatctgtgttcagatgttgatttttttaatatacccgctaagccctttgtatcttatttgaaataccagtggtgtttgaggctggcaaaaatcgccttgctggtgatcgtgatgatgaccagtttgatgaggtcggcaaggataaagggagcaacgaccaaagtaaatgctttttggagatcggtatgcgtgaccagcataaagccgatagctcctgatacaaagaggagagcactactgagaagattggcaaaaaagatagtgacaaggctggatttggcattggtaaataaagacgtgatccatgctcggaatgggaagaagaggaggaaaccagcagtaggaccaaggaaatgtgaagcgccaccagcaccgccggcaaatactggaaaacctaagaagcctagaagtaggtaaaggcagactgtgacaaaggcatggctgggtttatagatggtcccgatgatcccgatcatgagtgtctgtagggtcaaaggaatcggaccaaatggaatggtgaattgagataggacggagatcatggccactccaatggagatgagaactaagggaaagattttcttcataacagttaacctcgtatttattctatggtaactattctacaataaggagctcaacctgtcaatagcccacgcttgttttaggattttttaagtaaaaatttaggcaggcttaagactcccaaagtataatcgccttactaaaggatcgagctccctttaaattttaaaagaaaagtacttgtacaaaaagataaaaggtaaaaagatgaatcaaaaagaaacaaaacaagtagtcgaaacgcaagaatccaaagaaaaaatggttgtcctcaaacgaagtcctaagtggtggattggcatggcagccgttggtggattgttggttggtgctggaagtggctttggtgtcggtgtcatcgcctcacaatcttctaataaccaacaattttctcaaccggtccaaacgggtcaaaaccaaggaaccaatcagcaacaaaatagtcaaaatggccatgcttcacaaggaaaccagcaaaatggtggcccacaggacggcggtcctcaaggtggcccgcaaggaggtggacctggtcaaatgccacaggaaggcaatggtggccctcaaggaaatggtccagaaaatggcatgaaccaatctggcggacaagatgaaaaccagggttcctctaagaagtccaataagaagaattcaaaaaataaaaacaagacgagtgatagtcaaaataacaaagaaaacacgacaaactcatagaattagccttcctcaggcaggctgaatttgatcataaaaccaggttctaaactataggaaatgaaggcaagtcgtgttataatggttaagaatagattagaaagactcactcacgaaagagaagaggatacgacgatgattaaaattctattggtcgaagatgaccttggtttatcaaattcagtatttgattttttagatgattttgcggatgtcatgcaagtctttgacggagaagaaggtctttacgaagcagaaagcgggatctatgatttgattttgctggacctcatgcttcctgaaaaagacgggttccatgtcttgaaagaattgcgtgaaaaaggcgtgacaacccctgttttgatcatgacagccaaagaaagtctggatgacaagggacacggctttgagctgggagcagacgattacctcaccaagcctttctacctagaagagcttaagatgcggattcaagccctcttgaagcgttcaggaaaggtcaatgaaaataccctcaattatggcaatttaaaggttaatttatccactaattcgacttacgtggacgataaggaagtggaacttcttgggaaggaatttgatcttttggtctatttccttcaaaaccaaaatgtcatccttccaaagacccagatcttcgatcgcctttggggctttgacagtgatacgaccatctcagtggttgaagtctatgtttcaaaaatccgtaagaaattaaaaggtactgattttgttgagaacttgcaaacattgcgcagtgtggggtatatcttaaaagatgctaaccagaattaagaaaaccgtcggagaagatgatttttcctacttcatccgatattttgggctctttactttgatattctcagccatgaccttgattatcattcaggtcatgcgctcgagtctttatacaactgttgatgaaaacctcaagactctcagtcaggatccctactcgcttgtagcgattgcttatcgagaccagcgacagtcaaataccaaaggagatgataatgatcatgagatgatgatcccagatcatgataaatcagaacctaaaggggatgtcacatccaataccactgttgttttgctcaataaaaaatatgaaaacttgacaaccggtaatgggtttttaaactttaaaacggtgacatttggtcgaaagctcctcaacaaggtttcccagcttcaaattacaaatagctatgggaaaaaagaaagttaccgggcctatatggcagagttgagtttatctgatgatgaaagtgatagtgacatcaagtatgcggttgtcatgaccaatatcagtcaactagagcagaccagtgaagagcacgaaagtcaaatcgccctcatcatgatctgcttctggggaatctccttattcgctagcctcttcttagcacgtctcagcgtcaagccccttcttgagagtatgcaaaagcaaaagtctttcgtggaaaatgcttcccatgagttgcggacgcctttagcagttctgcaaaatcgcctcgaaacgctttttagaaagcctgaagcgaccattatggaatcgagtgagaatattgcatccagcttggatgaagttcgaaatatgaagcttttgactaccaaccttctcaatattgcccggagagatgacggcttgaagccagagatggaagatatcgaaccaagcttttttgatcagaccttctcgaattttgagatcattgcggaagaaaatgacaaactcttccgaggagacaatcaggtggacaaagttatttgttctgataaaacgctcctcaagcagttgatgaccattctctatgacaatgccttgaaatataccgatgaagatggcgagatccagtttgaagttcaattgaaggataaaaatcttcttttgagagtgctggataatggtccagggattcgagatgaggataagaaacggatttttgatcgtttttaccgggtcgacaaggccagaacccgtcagaaaggtggttttggtttggggttatccctcgctaagcagattgtagaagctttcaaagggactattcaagtcaaagataataaaccaaaagggaccatctttgaagtgaaattatccattaagacggaaagtcgtaaaaaaaatcgttcataatctttaaaaaatagaaaagaggaaaacctatgagttcaaaaatgttgcacacttgccttcgtgtggaaaacttagaaaaatcaatcgctttttaccaagatgcttttggttttgaagaaaaacgtcggaaagattttccagactacaagttcacgattgtctatttgtccttgcctggagatgactatgagttggaattgacttataattatgatcatggtccatatgtgattggagacggctacgcacacgttgccttgagtactcctgatctagaagctttaaatgccgaacacaaggctaaaggctatgaagtgacggaaccaaaaggtcttccaggaacgcaaccgaattactatttcgttgtagatccagatggatataaagtagaagtcattcgcgaaaaataagagtgattaaaattaggggccactgccggtgacgacagtcgccctcttttttatgaaaccatttacaaaaaaggaatgttttttcgatagaaatttgctataataaagttatgagattcaaacacacgaaaactatattattaatcattacaaatctccttttactgagtcttttgtatatcggctatcaaaagattcaaagggttcgtgaacaaaaagcctatcaggatcagtttgctaaggtcacccaactagagaaaagctctgaaaaagggaaagatgttcaagttcaggaagggattattgggacatcttatgtgaccacttattatcctactaaggatggacaagctgttgagattattaaagagaagattcaagaagatcttcagcgtctaggatccgatgagaaaaccaaagagcctaagcatttgaccttctaccatagtgaagaagcagaagcgccttttgttggctatcatcctatccaaatcaaacgggttgaataccagtataaaaaaggaaaattcatcaaagatgagaccgtgaaactacctctcttctacgtggatgatgagaaccaccctctgaccctcagtcaggtttttgcggatccagatggagccaaacagatctttttggaggaattgcgagggaatctagactttcgtcagttggatgaggaaagcattgatcaaatggtcgcccacttttcagggttggatttgagccaatgggaattccaatatgaaaaagggaattttaccattccatttccaagcaaggttaagggagatgataccttcactgttcccttgtctaaattctatgatgtgattgatacagagcgcttgcttcctgacgatctagcttcttaccaatcctatattgaagaacgccatcgtaagatgattgccctgacctttgatgatggaccagatccgacgacgacccctcaggcgctggccatcttaaagaaatacaatgccaaagctaccttctttatgatcggaaaaaatgtcagtgcgaatcccgatattgctaagcaagtccgcaaagaaggtcatcaaatcgggaaccatacttgggatcatcctcagttgccaaaattgagcttggataatgctaaaaaagagatcttggatacccaagaagctattcaaaaagcgacaggtgtccaaaccaagattacccgtcctccatatggagccatcaataacgccatccaatacggtgtagaccaatccttcatcatgtgggatgtggatagcctagattggaagacacataatacgacggctattctcaatgaagtgaaaaaagaagtcaaaccgggttcgattatcctcatgcatgatatccatcaaaccacgattgacgctctaccgaccgtccttgactacctcaaatcacaaggctatacctttgtaacggtggatgagttgttggattatcaacttgaaagtcatcgcatttattacaatggaaattaacataaaaatcctctgcagttcattcactagcagaggattttcttattcatttaaaaagagttctgaattttttaaaaccagttcacgtacagaagcgtatttttttaaggatttgagttcttctgggtgggtgataaaggtgatcacatagccatcacgccccattcgtcctgttcgaccagcacggtgggtataggtctctacatcacgggggatatcgtagttaatcacacactcaagatgttcaatatcgattccacgagcgaccaaatcggtggccagcaagagggtcagctgatggtctttgaagcgttccagaataaccttgcggtatttgacattgacatcactggcgagcgatacggcctcaacgccccggtattgtagtttttcttcagcactacccagatcagataggctgttgaaaaaagccagaccacgaaaatcttcgacgtaggcgagtttgcggagcaattcgaccttgtcccgcttatccacttgcatataaaaatgttggatattgtccaaagaaactccatcgaccgtaacgcgaagagtattttcctctagttggtctggatcgaccttggctgtggcgctcatgtagatatattggtggtcacggggagcatagtggctgatcttgtcgacgaagtggtactgagaatcacttagtaattggtcgaattcatctaaaatgatggtttctacattcatcattttgatctttttcagcttgatcagttcaaagatccgaccaggagtcccaaccaagatttcgggtccttttttgaggcgttcgatttgccgtttttgactagatcctgaaaggaagagttgtgtctggagcccgagaggctctgcccattgtttggtgacatcaaaaatttgtcctgctaactctgtgttaggagccaaaatcaagagttgttgggccttcttcggtttgagtttgagcaagctcggaaagaggtaggcgagtgtcttaccagtaccggtaggactgatcccgaggacattttctccctcataaattggggagaagatctgttcctgaatttcagtgaatgtatcaaatccgagtgtttctaactggtctttccagctttgtggaaattgttctttcattctttttcatccttaaattgtattccagcgctttgacgcatctggtagagggtttcatggacctgctcagctgtttgtaaccactcaagataagcagacggcttttgatgagcgatggcaaaggcttctgcctctttttgcatttggtgtgggcagggctggatcggaaggtcgatgatttccccagaatggctgatgaagcgagcctggttgatggctgctacagcattgagagttagcgttccagtcttggtgtagatttcagcaggtaaatggctggtgatatttttccctgcctgaatggcaacctgaaaatctggataaatcaagacaccttggccatagagatcaaccgaattgggtaattgctgagcggtgtagtggcttgagattggagttccaaagaagccaatggccaggtagaggcagtagactcccagatccatcaaagctccacctgcatagacatctgagaaaatattgggcatctcacctgcaagaagggccggcaatttggaagaatatttggcaaaggtgaagttagcgcctagtatttcctggttagagaggaagtctttaactacttgaaaggctgcttcttggtaatttctggcagcttcaaagagatagacctggtgctccttagcgagcttgaccagttccttccattcagaaggcttggtcacagcgggtttttcaatgatgacatgcttcttggccagaatagcaagcttggcctgagcgaaatgaagagaattggggctagcaatgtagaccacatccagctcactgtctaagaagtcgatgacatccgtgtagcaagagatcgccccataaggctcacaaaactcttgagccgtcttcatctttctcgaatacacagcctgcaagtgatagtggcccgtctgatgagcaactgtaataaattcatgtgaaatccaactcgtaccaataattccaagctttaacataaggtgtccttccgtaatcgattcactctattataccatgaaaagggggagggacggggtgaaaaatactagggtttatgagagttttttgttacaatagaaagtgaataagtcaaggagtaagagatgaccatatcagttgtagtcccgtgttttaacgaagaagaatcaattccattgttttatcgagaaatggaacgtgttcggatgaagatgggagaaaagtttgaatatatttttataaatgatggctcctcagatagtacgctatccgttcttcgaaagctacatgttacagattcaaatgtgcactacctttctttttctcgaaatttcggaaaagaggcagcactatatgctggacttgagcgtgctagtggtgaatacgtgaccgtcatggatgtggatctgcaggatcctccggaattattgattgaaatgaagcagaggttggaggaacagccagatctagactgtgttggaacccgacgcgtaacccgggatggggaacctccgattcgctctttctttgcgcggacgttttataaattgatcaatcatattagccaagtggaaatggttgatggagcgcgtgattttcgtttgatgcgtcgtcctatggtcaatgctattatggagttatcggagtacaatcgtttttcaaaagggatttttgcatgggtaggatttgagacagaatacctcgaatataaaaatgtagagcgcgtggcaggagagacgtcttggaatttttggtccctctttaaatattccattgaagggattgtcaatttctcggatgccccgctaaatattgcctttattggtggacttttatcttggatcttggcctttatcatggtgattctgatcgtaatccgtaccttagtctttggggatcccacttctggatggccatccctcatgacagtaattctttttcttggaggctttcaattactaaccattgggattttagggaaatatattggtaagatcttcatggaaaccaagaaacgtccaatctatgttatcaaagagaaaagtgagtaaaaagcagaaaacttctgctttttttgctataatgatagggaaaaagcatttgaaaggaatttaacatgattttaattacaggagcgaatggtcaacttggaacagagcttcgccatttgttagacgaacgaaatgaagaatatgtagctgttgatgtggctgaaatggatatcactaatgcagagaaagtagatgaggtattcgcagaagtgaaaccaaccctagtctaccactgtgctgcttacacagctgttgatgcggcagaagatgaaggcaaagaattggactatgccatcaatgtgactggtacagaaaatgtagcaaaagcgtctgaaaaacatggtgcaaccttggtttatatctcaaccgactacgtttttgatgggaaaaaaccggtgggacaagaatgggaagtagacgatcaaccagatcctcaaacagagtacggtcgtaccaaacgtatgggggaagaattggttgagaagcatgtgtctaacttctatatcatccgaacagcttgggtctttggaaactacggtaagaactttgtcttcacgatgcaaaaccttgcaaagactcacaaaacacttacagtcgttaatgaccaacatggtcgtccaacctggacccgtactcttgcagagtttatgacttatttggctgaaaatcgtaaagattatggttattaccacttgtctaacgatgcgaaagaagatacaacttggtatgactttgcagttgagatcctcaaagatacggatgttgaagtgaagccagtggattctagccaattcccagctaaggcgaaacgcccactgaactcaacaatgagtttggcaaaagcgaaagcaacaggattcgttattccaagctggaaggatgccttgaaagagttttataaacaagaagtgaaataagaattttacctttataaaaagaccggtaaggtctttttatattgaagtaaaattattttcactttttattgaatctaatctatagtataataaaggaaaatagattttgtaggagaagcaaaggtgtcacaagataaaaaatatcgcgaaaaaggtgatattaaagaacaatatttgtatgataaaaatccttcaaatggttctacaaaacaaaattatgtttggaacttatttggaacagtttcttcatcgttaatttcagttgtactattactttttgcttctagatttcttgattcacacaattcagatatttttagtattgcatatgctttgggccaacaattttttgttctaggttacttccagatacgtaatatgcaatctactgatattcaggaaaaatactcatttatctcatatcataatacacggattgtaacaattatgatgatgatactaacttctgttggatatgtaattttccagggatatgatttatataagtctataataatcttactgttggtattatatcgtgcaatcgatgcttattctgatgtttttcaaggatactttcaacaacaaaaccgttctgatcttgcaggaaaagttcaattttatcgaagttggatttgcataatagtctttgggtttagtttgttactaacgaaatcattaatgatttctagtatcgttatatgtttgattaatttaatacttacagttgtcttagattatagaatttctattaggaacttcaatacaaaattttttccttcaatatcaaaagatttaagcagtatattttctattttgagagaagcttttcctttatttataaatggatttgtaataacctatgtctataatgaagctaaaattgatattgatttgctactgtctaagggattattttctaatggtattcagcgggactttaatgtactgtttatgccagtttttgttttatctctcttattttttgttttgagaccattgacgactcaattatcgatttattggtacgaacggaaatatgagttattttataagcaaatttatattttatttacaactatgactatcttaggtgtaattattataggtctgggttatttaataggtacagagattctaggtcttgtctatggtatatctttaatagaatataaaataccttttgtaatacttttaactggaggtattcttaatgtgttggcgcttgttattgatatagttatgacaatttttagaaagcaatcatatctagtgattgcatatattactacctttattgtggctaaattgattactatgatatttgtaaaaaaagatggaattctaggtgcatcattgtcatttttaatttcgatgactatcttttttattacaagcatgttgatctatattttggtaaataataatgataaaagaaagagaagttaatgaatattttatttacattaaataatgcttttgttcctcaggtagcaacttgtatgtgttcaatttttgagaataataaatcaattgatgaaattaatatctatttgattgcttcgaatatttctgatgaaaataaacagaaattaattgatttcgccaaaaagtatgggcgtagtgtacatataattcatttagatgatgtctcagaatttatagattttgactttgataccaatggttggtcttctattgtactagctaggctattccttgataagttactacctgataatattaatcgaattttatatttggatggtgatactcttgtattaaaagatctttctaaattttataatattgatcttggtgacaacgttttaggcatgtgtcccgaacctactgtagacaaaagaagaagggaatttctatctttaatggaagctccatatcataattcaggagtactattaattgacttaaagcaatggagaaatcgagaaatagggaaaaaagttattgatttttataagcagcacgatgggaaactttttgcaccggatcaagatgcattaaatggtgctcttaaagatgatatagtgacattaccaatttcgtataattatttcaatatatatgatacatacccatacagaatattaaaacgattaagtttacctgcagatttcatctccaaaaatgagtttttagaaattaaaaaatcaccttcaattatccactatttaggagaagaacgtccttggcgaaagggaaacacacatagatttgcaaaacaataccttgaataccaaaattgtacaccttggtcagatactcctatggaaacaggttgggaattatactttatttgttttaggatatttaatataattatgaaaccttttccaatgttgagatataagattattaactcgctgataccagcatttatgaaataccgaaaaaaacagctccaaaaaaataatagatagacgtattagacatagaaagaaaaagaatacatgagagttttaatgataattcctgcctataatgaagaggaaagcattttcgatacggtaacaagtatcttgaattaccgcaagaaagttgattttgatttggactatgttgttatcaatgatggatcaacagataaaacaaaacaaattttggaagagaatcattttaatgctgttcatcttgtgatgaatcttggaatcggcggtgcggttcaaacaggatacaaatatgcactagagcatgactatgatgtagcagttcaatttgatggcgatggccagcatgatattgaatccttgtcagatttgctagaaccaattcgaaaaaatgaagcagacttagtaattggttctcgttttgttggtgatgttaagtcggaatttcaaacgacttttatgagacgttttggtattggcgttatttccaatctgattaaatggacaacaggacaaagagttttagatacgacatcaggctatcgtttagctgataaagctgttatcaaacaatttgctagacgttacccaatcaagtatccagagcctgaaacaattgttcacattttgaaacgtaaatataatgttgtggaaaaacctgctaatatgtttgaacgtactggcggagtgtcctccatcacccccatcaagtctattcgttatatgattgaagtatgttcatccattttaatcgcagcctttatgagggagagtgaataatgtcagtattatctatagttatgttggtagcttcaatctttttcctttatctagtcattagaaatatcaacaaaaataatatcttatttgaacaagcattcatgtggattgtaatcagttttgtcatgattattatttccattttcgatgttattcctggttattttgctggtttacttggatttgaattgacttcgaattttttattgtcgcttgctatatttttcttgttggttattgcttttttacaaactatgactttgtcaaaacaaaaagagcagatgaagcatttagttcaagagttgtctattctaaaaagtcatatagaaacgaaagagggaaatgatgaacaataatcacacttgggtgatttgtgcttatggagaaagcgaatacttagaagcttgtattcaatctttgaagaatcaaactctccaatcacagattatctgttacagttcaacaccactggattcgatcaaggaactttgtcagcgttatgctattccattttacaccaagcaaggtggtgggattggtaaggattggaacaatgccatgtcttttgtagagacgaaatatgctaccattgcccatcaggatgattattatgaaccggactatgctcagaaagttttggctaagatggaaaaaaatcaagatgtgttgattgggtattctgattattttgaagaaaaagacggccataaaattcctgcgaatacaaatctgaagatcaaaaccttgatgttaaaaaccatgaatctttttcctgctagtcacttttggcgaaaccgtgtgatggcttttgggaatccgatttgttgtccagctgttacctataatcgtgaaaatttgaagaatttctattttgatgaaggaatgagagtgagtttggattggtacgcatggtataagatcagcgagtataaaggtcgttttgcttatgtatctgacaagctcatgtgccaccgtatccatggagagtctgaaacatcaaaaaccattgcagacaatacgcgtagtaaagaagatctatacatgtaccaactcttctggcccaaatggatggccaagttgttgatgagacaatatgtgaagagtcaaaattcgaataattagaagtttttataataagcggctctaaagggtcgcttttctgtttgtattaggcaaaaagcctagaaaatggtataattgaatagactgtgaatgatttgaaagggaactctatgcaacatgtttttattatcggaagtcgtgggcttccggctcaatatggcggttttgagacttttgtggaccaattggtttcgcatcaagtgtctccagatatccagtaccatgttgcctgcctttctaatgatcaagcctattatcattttgactacaagggtgtcgattgttatacgattaaagcacctaagcttgggcctgcgcgtgtcatcgcctatgatatgatggccatcaactacgccttgaagcttattaagaaacaaggaattgaacagccgattttttatgtcttgggcaatacaatcggagcctttgtggcgccttttgcgcgtaagatccataagatgggtggtcgattctatatcaatccagatggactggagtggaagcgggccaagtgggctaaaccgatccaagcctatctcaagtattctgaaaagatcatgacgcgccacgctgatttggtaatttcagacaacccaggtattgagtcctatatcaaggaagcctacccttggtctaatacgacctatattgcctacggaacggacttatctccgaccagcctaaacagtcaggataggaaggtccgagaattctatcacaagtggcagactcaagagaaaaactattacctaattttgggccgctttgttccagaaaataattatgagaccgccattcgtgaatttatggcctcttctaccaaacgggatttggtgattatttgtaaccaggaaggcaatccttattttgaggagctccgagctcgaactggatttgatcaggatcctcgtgttaagtttgtaggaacggtttatgatcaagacctcttgaagtatatccgtaaagaagcctttgcctatatccatggtcatgaagtgggcggaactaatcctggtctcctagaggctcttgcccagacggatctgaatttagttttaggggtctcctttaaccaaacggtcgctaaggattcggctcaatattggactaaagaaactgggaatttggcacatttaattgatcaggtcgattctatagaagatgtatctgaatggggtcaacgagccaaggctaatatgaagcaaaactttacctgggaaaaaattgtaggtgagtacgaggaattattcttatcatgaaagtaaatatcttgttgtccacctataatggtgaacagtatctaaaagagcaggttaaaagtatccaagaccagacttatcaagactggcaactcttgatccgagatgatgggtcaagagatggtacggtgaagattattcaagatttggttgcccaagatgagcgcattcacttcatcaaccaaggagctatcgaaaatctcggtgttatcaagagcttccatgccctcttgaaatatgagaaagcagatctctattgcttcagtgaccaagatgatgtctggcttcctgaaaaaattgctcttcaagtagcaaaagcagagaagcatcttcaagaagagcctttgctggtctatacagatttaaaagtggtcgatgaaaacttgaacgtgcagcatgaaagcatgattcgcacccagtctgatcatgccaataccgaactgattcaagagttgacggaaaatacggtaactggcggagtggccatgattaaccacgcgctggctgacttatggacaggtcaagaaaaacatgcgctccttatgcatgattggtatttggccttgttggcaactgcctttggcaagctcatctatatcgatcaaccaacagaattgtaccgtcagcacagtagcaatgttctgggtgctcgaaccctcagaaaacgggttaaaaattggatccgaccccatgtgctgtttgccaagtattggaatctcatagagtctagtcaagaacaagcaaaaaatctattggatctgcctgtcagttcccaaactaaagaaattattgaaaactttgtcaccattatggatgttccactaaaagaacgtctgagacggattcgtcagtatggttatcgtaagaaccgagcctttcacacctttgtgtttaccagcttgattctgacaaagtttgcatatcgaggtaaaaaataatgtttgacgtttttagtcagaaaaatcgaattttattacgagaattaatcaaaacagactttaaattacgctaccagggatcagcaattggttatctttggtcgattttaaagcccctgatgacttttacgatcatgtatattgtcttcatccgattcttacgcttgggtggagatgtgccccatttcccagttgccctcttgttggccaatgtaatttggggcttcttctcagaagcaacatccatggggatggtgtcgattgttagtcgaggcgacctattgcggaagttgaacttctcaaaacatatcattgtcttgtctgcgatttcaggagcagccattaactttgtcattaaccttgtagtggtcttgattttttcattcttcaatggggtgacattctcttggacagccttgatggtcattccgttgttttttgagttattcttgatggcgacaggatgcgcactgatcttagcgacattttttgttcgtttccgcgatcttggacaagtctgggaagtactcctgcaagcaggtctatatgcgacgccaattatctatccgattacctttattgcagaccgcaatccatgggctgctaagttggtcatgatgaatcctttggctcaaattattcaagacatgcgttacttcttgattgataaggccaacacccctgtctggcttttggtggaaaataagttcttggtactggttccttatattttaccaattcttatttttgttgctggctttgcttactttaacaaacatgctaagaaatttgcggagattctctaatgacagataaacaaattgcagtaaaagtagaccatgtcagcaagtactttaagttgccaacagaggcaaccaatagtcttcgaactgccctggtcaatcgcttcaaaggaatcaaaggatacaaagaacaacatgttcttaaggatatttcttttgaagtagaaaaaggtgattttttcgggatcctcggtcgaaatggttctggaaaatcgactctcttgaaaattatttctgaaatctatgtgccagaaaaaggtactgtcactattgatgggaaactggtgtcctttatcgagcttggagtaggctttaacccagaactgacaggtcgagaaaatgtctatatgaacggcgccatgcttggcttttcaacagctgaaattgatgccatgtacgatgatatcgtagactttgccgagttgcatgaattcatgaatcagaagctcaagaactactcatcaggcatgcaggttcgtctggcattttcggtcgcgattaaggcccaaggcgatatcttgattttggatgaggtcctcgcagtaggagatgaggccttccagcgcaagtgtaacgattacttccaagagcgcaagaaatcagggaaaaccacgattctggttacccatgatatgggagccgttaagaaatattgtaacaaggctgttttgattgaaaatggtttggtgaaggctttagggagtccagaaaatgttgccaatcagtacagttttgataatacagctcctttgcaacagggaggagaagctaatggagcaggcaattccaaccaggaagaaaaagtcttggttgaaaattttcagcttcagttgttaagctcaaacaaattacgtcctcaagatcctattcagttccagattgattttgatgttcgtgaagatatcaggacctatatcgctctgtctttaacagatatcgatcggaacatttggatctacaatgataattctatgaatcaactgatgagtggaactgggcataaaacggttcattatacttgttcactgccaactgtaaatgacttaaaaatgaaattggaagtgacagtaagggatgaggaagggcagatgttggccttttcagatgccactcagacaccactgatctttatcaatcgagatgatattgctttggatgataaatcagcaatggattcggcaagtggcttaatccaacgcaatggaacatggtcaatgactgactagactgagggaaatatggaaacgacgccttttgtttcgattatttgtacggtttttaataaagagccctggttaaagaagacgattgatagcttcttagcccaacaaacagagtttgcttatgagattatcttggtggatgatgcttcaagtgatggatctcgttctatcattcaggattatcaagccaactaccctgatctgattcgcgccttttatcaggatgagaatcagggaatttctaaaacttgggtttctatctgtagagaagtgcgtggacagtatattgctcgctgtgacggagatgatttttggttggatcctttaaaacttcagaaacaggtttccttaatagaaagtaaacctgattgcaaatggtccaatacagatttcgatatttatgatgaaaaaggaactctcgtttctaaggctggctttgctaatcacacgattccgttagcggatacctatgaaaagatgcttgcaacaagaggctttactatggcctctacatggctagttgatagagatctgatgttagaagtcaatcaagagttagacctaacgacatcagatgatacttttaacctccaattggagctttttcaacggacttctttagcctatctggatgaagcgacggtagcttatactattaaccaaggatcggattctcgtcctactgatttcagaaaactagaacgccgatttcataagttattgcaaacgcaacttgagtatcttgataaatatccaaatgccgattttaaagagatgacgaagatccttttagatcgtaataatacgtatgaaattcgtctttctaaaccgatggattctctttcacacattggaatggagtctgttacaatttattttggggacgaagaaaatacttattcggaagatcgtaccatgaccaaacttcttcaaaaagaagatagtctagcaatagaaattccgaagggaactactgttatccgagtcgatctttctgaaaatcctagttattactctgatgttgaattgaaagattcgtcaggcaaggcttgctcagctatttatagtaatggcgttgttgttgataatttgtatttgtttagcgaaccggatcctcaattgatttatgaagttgaagaagaaggggtgtatcaactgagctataaaatgatttctatagataatccctctgcaccggattatattggaaaagtttttgttgccgaaatgttagattgtcaaaatagtttgaaaaatcttgagacagagttacaagctacgaaagaagaatataatacagtcatccattctcgccgttggacgattccaacaaagatcttgaaattcttaagaataaggaaataacatgcaacgtttacttttatatgtccacttcaataaatttaactttatcagtggacatgtactctaccaattagaaaacattcgtcccctgtactcacgggtggtctttatctccaatagtcagctaccagaaggtgtgaaggatcatttgtcctctcaacagttggtggatgatattcttgagcgccaaaatagtggctttgactttgcggcttggcgggatggaatgaagacagttggctttgaccaactggctcattttgattctgtcaccctcatgaatgacacctgctttggacctctttggaatctagagccaatttatcagcagtttgaaaatgataatgaagtggatttctggggaatgaccaattaccggaaagacaaggattttaacgagcatattcagagttattatcttagctttaaaaaacaggtgctgacatcaagtgctttccatgaattttggcaaggtgttcaggacttcaccaatgttcaagatgtgattgataactatgaaaccaaggtcacaacgaatttcttggatgctggttttcgctataagacgatctttgataccattcatgaagacaccacagggatgctctatccagacttttcttactataatcctacagcgattctcaatcataaggttcctttcatcaaagtcaaaaccattgcaaataacgaagggattatgccttatatttttgatgagttggagcgtgtttcgaactatccattagacttgattctcaaccacatgtctatgattgatcgtccggattatccttatctcttgtctcgtaagtacttgaaaaaacaagaattggctggagatttcggtaaaaaagttgcggttcatcttcatgtcttttatgtggacctcttggaagaatttctagatgcttttcgagactttcattttgattatgacttatggatcacgacagatgcagaagagaagaagcaggctattgaacaaatcctttctaatcgggcacaagatgcgacggttgtggtgactggaaatattggacgagatgtgttaccaatgctgctcttaaaagagcaactctcaaaatacgattatgttggccatttccataccaagaaatccaaagaagcagatttctgggcgggtgaatcttggcgcaaagaattgatcgagatgttggtcaaaccggctgatcaaatcctagccaatatggaagccaatccaaaagtcggaatcactatcgcagatattccaaccttcttccgttacaatcgaatagtggttgcctggaatgaagctcttatttctccagagatgaacaaactctggcaaaggatgggggcgaccaagacaattgatttcaaaaatctcaatacctttgtcatgagttatgggacctttatttggtttaaatacgatgctttgaaaccactctttgatttgaatttgacagcagcggatgttccagcagaacctcttcctcaaaattcgatattgcatgcgatcgaacgtttgttgatctatattgcctgggatcaaaaatatgactttaggatctctcaaaacccacatgttctgacaccatttatcgataataagcagttgaacaatcgcgaagatcttcaaccccatacctttgtagactttaatcaaattggggggatcaaaggagccttgaagtatatcgtaatcggtcctgcaagagctgtgaaatatatactaaaaagaatgataaaaagaaagtagagtaaattatatgggagttattgataagactaaaattagaaatattttaatcgctatatttttagtattattttcaagggtgtttttggctagtttatttcaatttactatcaatcttaaaattatacttttaattattagtatcgtgatgtattttattctttttgatccaaaagacaaaaagaaattgccaattaatgctttttttctgataattattttcggtagtgtaatttcagtagtgaaaccagtccaatatggattagatgaagagtctcatttaccaaacgtaattagtatttctgatagtcctatttttaaatattccaatgagaaattggaagattataattcagtttttaaatatgatgcactaagaaatcctagtaaaaaagataaaaattattggtttaatgttgagcataaggaaagtaaaattaaaggagtaagagttggatttgataatccagccttcattcctagtgcaattggatggaatataggtagattaatatctaaaaaagtgtttgtttcctattatttgggaagaatcttcgaagtaatagcatatgccattctagtatttattgcattaaaaatcagcaaagtttatagaggagcgatatatttattttctacattccctgcagtattgtacatcatagcaggttatcattatgattatttatattttggagcaactttaattagtcttgctttattgacaaatatactatctggtgaaaataaagttgataaaaaatatactattgcatttcaattttccacatttctattttcatttgcaaaatttccgtttgtattaattggaagtctattttcaatattgccaaataagtattatcaggataaatcagtaagaaaattcagttcaatcttgtttggtttaaatttattaatttcctttacatacgttggaatcattaaattgtttgcttcagacaacgctttgtcaggcaaaggcccaggactattatattttgtaacacatccattaccattaattagaactttacttttagcaccatacggtattattcatgactttgtttctgaaccattgaaatatgtttcagaatcgtctccgtttttaattgcaatttcgatagttattttctttttcgctatgtttgtaattgcattaaaaaataaaattgaaatgccaacattttttaaatattactgtcttcttttacttgcaggtattgcctcattaatagtaattgctatttcaggagatccgagggtatatcacaaaggtgatattactgtaggtggtgttcaaggtcgatattattattatattctgatgttcttgccactcttttgtggatcatggtttagaaaactatttggttttatggaaacaacaattcagaatgaagattcgaactttgaatgcagcttgcagtatatgttagtgtatttaaacattttaacaataagtattggtatatacactcaattacagggataaaaaaacttttaggaaggataaaaaatgaaaagaaagaggaaattagactttagagattttctttttaaaatttttaataaaataacaagaacacaaaagtattgtattgctctctttcttttattttttataagcaacactttcttaacacaaaatttgatttctaaagaaattaaatcgacaggatctgtattatttctggttaatcagtgtggtatttggtttggaatttcatttttaattttagttttactaatttcacaatacactttaaaatggttttttttccttaagattttagtttcatatgtaatctatttaatactatcttactcgattgatgtttcgcttaatatcaataatcctagttataagattaatgattttgaaaaaaataatttttggcaatttaattctctaacttttgttttaacattgttagtgatttcttatgttttgggacagattagaaaatcatatgataataaagcaaacagaaaaaaattagaacctattgggaaatggttcgaatatgtcttgcattctagcgtagtttgttcgttcatttttactgattctaaaattccttctctattgtatcgtacatcatggtatgtatctggaaattttgagaatttaggagcgggaaagtattccttgagccaattttggattttagaattttatttgctattcttaagtattttcctgactttagttggcctgctttttgttaagggacaagttgatgtagtaaaaaataggtctagtttttcgctagctatatttacaagtattagtcttgcaatattatttaatgcaggaatacaattgggtctaggtcatggggaacctttggttggatactcaatatttcctggaggtgtaatatttcagatattatgtttatcttatctgtttatttttctatatataatctttaatagatatttatttacgacaatattgattttatttggtggggttctgtttattgttgctaatgctataaaatttagtatgcgtgcggaaccaattttgccaagtgatttggtttgggtatttcaaccttctgttttatttagttttgtagatgtctcagttttaatgactgtgagtatttccttagtgatttttacgtttatttatataattggaaggagatatatttatccaggtagaattattcgcgcaacaatcttaagatttgttttattaggacttatgctcttattgtccattaatgtttattctatttttaaaagaaaagataacggtaaaattatagatgatgttccgattattaccttgctaaataatttccaagatacaaagtggttagggaattctataaatgctagatatcgatcgttgtcatatgtatggttaaatcagataactagtgatccaataatagaacctaaaggatatagtgaagaaaaaattaaggaaatcgagaagaaatacaatcaaatagctttaacaataaatgaaaatagaaatgagttaattgagaatcaaacgattgtttatgttttaagtgagagttttgctgacccagcaagaatagagggagtaaatttatctagaaaccctataccaaaaattcaagaaattaagaccaaagttacaagcggattaatgcaatcggatggttatggtggtggaactgcaaatatggagtttcaaacattgacggggttacctttttataatatcaatcctacagtttctgtattatactcagaggttgctcctaaaatgagaagactaatatcagtcagtgattcatttaataataaagaagttattcatttcgaatctccaattaattattctagaaatgtaatttacaatagattgaaattcaataaatttataagtattgatgataaaaagaattatgatttaggttatcaagaagtgcatataagtgatgaatctacgtataaggtagtgttgaaagagatggatgctaaaaagaatcagttcttttctgtcattacaattcaaaatcactccccatttatagcaggagaaccttcagacttaacagcaacagccaaaggattttcggatgatgaaaatacaaagttaacaaattattcacgtcttttaaccttcaccgacactgccacccaatccttccttgaaagtctttctaaaatagataagaagattacagtggtgttttatggggatcacttgccaggactttatcctgagtcggcctttaagaataatccggagagtcagtatcagacagactacttcatttggagtaattttgatgctccaaaattgaattatcctttggtcaattcaagtgatttctccgccatggtctttgaacaaaccaattcaaaagtttcaccttactatgctttgttgacagaagtattaaaaaaagcaagtgtcgataaaaaggccttagaaggagaagcacaagagattgcggacgatttaaaaatggttgaatatgacttgattagtgggaaaggatacctatctaaagacttctttaaaattccaaccaactaatcccattaaagggagagtcagcagttaaaaatctttgtgtttttaactgtcggactcccttttttttgctttttatgctaaactattagatgggggtatgctcatgattaagatatttggaaaggtccattatcattggcaaccggacttatctattcttgtgacttattggtccattgcagtgattccggtctttattggactggccttgatgtatgagagctctagtgtgccaacgctagttttgttttcgttctttttatttatggtcttgctcgcgattggagttcatcgttactttactatttatgatgatgggattttacggattattacagccaatccttttaccccaattaaagtgaagatcacttccattgagaaagtagaagtgaataagaagtctatcaaactcgtctttaataatggttcgcgtagtcggacattctgtatgcgcaaatggccgaaaaaatactttatcaatgcacttgccttaaatccctattttaagggggaagtagttttgacggataactttattcatgtggactactatgagatgtattatgcagacaaataaaaagccctcttaatcttttaagagagcatgagtggggcattctctgatagcctcgagaacatcgtttgtgagagggacttctttttcgaggaggtcgtcctcttcggtaaatttgacgataccattatcatggtaatcgaacaactcagagtaggtttgacagagaccgcaagcgatgcaacgatctggaattaacgtaactttcatacttctattgtaatgatttttacgagaaaaaacaaggaggaagtcatggcaaaagaaccatgggaagaagacatttacgatgatggagaagaaacattgaaaagaacgagtaaattaaatggagtgaaggctgatcgtctcttaacgattttggcgattattttctttgtggtggttgtggccatggtgtgtttgttgattttcctttctaccggaggaagcgacaaatcaaaacaaatggctggtttctacaatggagagactaaggttgaacagacatcatcagctcctgtagcacagacggaccaagcagctactaaagatagttcaaaagatgagaactctgaagaaggcacgatcactgttcaagcaggtgaaggggaagcagcgatcgctgcgcgtgctggtatttccattgcccaattggaacagttaaatccatcccacatgtctacaggatcttggtacgccaatcctggtgatgtcgttaagattcagtaggagtagagaatgaaacaaattcaaattgctattgatggccccgcttctagtggaaagtctacggttgcaaaaattattgctaaggatctgggttatacctatttggatacaggagctatgtaccgtgcggcgacttacctagctttgcaaaataatttaacagctgaacaggttgatgacctcttagatcttttagatcagtatccaattagcttcggtcgttcggaagaaggagagcagcttgtctttgtagcagacgtagatattactcacccgattcgcgataaccaagtgaccaacaatgtttcatgggttgcagcacttgcgccagtccgtgaaaaacttgtcactctacagcaagcaattgcagcagaggggggcatcgtcatggatggtcgtgatattggaaccgtcgttcttccacatgcagagttgaagatctttttggtcgcttctgttgaggagcgggcagaacgtcgttataaggaaaatgttgagaagggcatcacagcggatcttgaattgttgaaaaaagaaatcgctgagcgggactataaggacagccaccgtgccgtttctcctttgaaacctgcagctgatgccattcattttgatacgacgggtgttggaattgcagacgttgttgcatttattgaagaaaaagcaaaaaaacttcttgacaaagaataaaaaacttgatatcatataaaagttgagaaaagcagaagtgagaacttctcgccttgtgacgcaagttgcctggcccctacggatcaagtttcagtaatgaaatacatcatgtagttcgggcctgttttgcaggtccgttctttgtttttctcgaataataaaaaagaggtgaaaaccatagcaaagcaagacttattcatcaatgatgaaattcgtgtacgtgaagttcgcttaatcggtcttgaaggtgagcaattgggtatcaaaccacttagcgaagcgcaagcacttgcggacgacgctaatgttgacttggttctcattcaacctcaagctaaacctcctgttgcgaaaattatggactacggtaagttcaaatttgagtatcagaagaagcaaaaagaacaacgcaaaaaacaaagcgttgtgaccgtgaaagaagttcgtttgagcccagtgattgacaagggtgatttcgatacgaaacttcgcaatgctcgcaaattccttgaaaaaggaaataaagtgaaggtatccattcgctttaagggtcggatgattacccacaaagagattggtgctaaagttttagccgacttcgctgaagcgacacaagatgtggcgatcatcgaacaacgtgctaagatggatggacgtcaaatgttcatgcaattggcgccagcaactgacaagaaataatctgtcagaaagttaaaaaaaggagaaaatatcatgccaaaacaaaaaacacaccgcgcatcagctaaacgtttcaaacgtacaggttctggtggacttaaacgtttccgtgcttacacttctcaccgtttccacggaaaaactaagaaacaacgtcgtcatcttcgtaaagcatctatggtgcatgcaggagatttcaaacgtatcaaagcaatgcttactcgcttgaaataatcgcgtattcataagtaaagaattctaggaaatattggaggaaatataaatggcacgtgttaaaggtggcgttgtatcacgcaaacgtcgtaaacgtattcttaaattagctaaaggttactatggagctaaacatatcttgttccgtactgcaaaagaacaagtaatgaactcttactactatgcataccgtgaccgtcgtcaaaagaaacgtgacttccgtaaattgtggatcacacgtatcaatgcggcagctcgtttgaacggactttcatactcacaattgatgcatggtttgaaattggctgagatcgaagttaaccgtaaaatgcttgctgacttggctgttaacgatgcagtagctttcacagctcttgcagatgcagctaaagcaaaacttggtaaataatttttataagactgggaagattttctcagtctttttttcttgctgatttcatgctataatgaaatcaattataggagaaatcatattagatggaggacctaaaggtgacacacaatcgactagcatgggatgagtattttgcagcacaggccttactaatttcaaatcgggcaacttgtaatcgcgctaaggttggggctgtactggttaaggataataaggtcattgcaacgggttataatgggtccgtttctgggacagatcattgcttggaggatggctgtctaatggtcgaggggcattgtgtccggactattcatgcagaagtcaatgctattttgcaaggagctgaacgtggtattccaaaagggtttacagcttatgtgacgcattttccttgtctcaattgtaccaagcagttactccaagttggttgcaagcgggtagtatacattcatcagtatcgaattgatgaatatgccgagtatctctaccgtgaaaaagaagtagaactgatgcatttaccgattgaagaggtgaaacaggcaattgcagagacagaactggtctagtttgtactttttttgaagtgaagactgatggatactgtaatgaggggataggtatatctccaattcttctggataagtagaagagaatgacggcctcaatcttcttgaatttatttagtttatttatcgaattggaaggaatttggattacaaccttttttcctattcatatctttattgctagtaaagaaatatgtctgctactttcaagagtgatatagattgaaactatatcaactccttttttaaaacatagtctatcatagttgaaatgtgttataatgaagtgttatatggtcccgataaggtgatagtctttctatcagtgctttgtaactctataacgaatatttattttaaggggggacatttttatgtcagaacgtaaacttttcacgtctgaatcagtatctgaggggcatccagataagattgcagaccaaatttcagatgctattttagatgctattttagagcaagatccagaagcacacgttgctgctgaaacagctgtttatactggttcagtgcatgtcttcggtgaaatttcaacgactgcttatgtggatattaaccgtgtggttcgtgatacgattgcagagattggttataccaatacggaatacggattctcagctgaaactgtaggagtacatccatctttggtggagcaatctcctgatattgcccaaggggttaatgaagccttggaagttcgtggaaatgcggatcaagacccactcgatttgatcggagcaggagaccaaggtcttatgtttggtttcgcagtggatgaaactgaagaactcatgccattgccaatctcactcagtcacaagttggttcgtcgtttggcagagcttcgtaagtctggtgaaattagctatcttcgtccagatgcaaaatcacaagtcactgttgagtacgatgaaaacgaccgccctgtgcgcgtggatacagttgttatttcaactcaacatgatccagatgtcagcaatgaacaaatccacgaagatgtgattaacaaggtcatcaaagaagtgattccagcttcttatctagatgctgagaccaaattcttcatcaacccaacaggacgctttgttatcggtggacctcaaggggactcaggtttgactggtcgtaagatcatcgtggatacttatggtggttactcacgtcacggtggtggtgccttctctggtaaggatgcgactaaggtagaccgttcggcttcttatgcagctcgttacattgccaaaaacatcgtagcggcaggtcttgctaagaaagcagaagtgcaattggcttatgcgattggggtagctcaacctgtttctgttcgtattgataccttcggtactggaacagtcgctgaaagcaaattagaagctgcagcgcgtcaaatctttgaccttcgtcctgcagggattattcaaatgttggatttgaaacgtccaatctaccgtcaaacagcggcttatggccatatgggacggacggatatcgaccttccatgggaacgtttggataaggtagaagccttgaaagaagctgtaaaataattagttgaaatggaaaagttagggtcaagatgatcctagctttttttcgttttgaaaattcctacagatggaaaaataggtcgatctgtggtataatagttagagtattttaaatacattgtcccttttatttccgttgaaaaaacgatagtaaaaggaaaaagacttgaaagagctaataattattaagatgaaaaaaattgtaataaatggaggtcgccctctaaaaggagaggtgaccattagtggtgcaaaaaatagtgtagtggccctgattcctgcaaccattctggcggacgatatcgtgaccctcgatggggtaccggatatctcagatgttgcaagtctgattgaaatcatgaccatcatgggcgctaagatcgaacgcaaagaagacagtttgatcattgatccacgtggggtgaaggatatgcccatgccatttgggaaaatcaatagcttacgagcttcctattatttctatggcagtttgttagggcgctatggtcaagcaactgttggactacctggaggatgcgatctcggcccacgtccaattgatttgcatttgaaggcctttgaagcgatgggagccgctatgactatggatggctctagtatgaaacttgcgacagatggcaagcctcttcaaggagctaacatctatatggatactgttagtgtcggtgcaacgattaatacgattttggcagcggtcaaagctaaaggtcggacagtgatcgaaaatgctgcgcgggaacctgaaattatcgatgtggtgaccttgctcaacaacatgggagctcatattcgtggagcagggacagatattattatcattgatggtgttccgcatttgcatgggactagacatcaagtaattccggatcgcatcgaggcaggaacctatattgctcttgcagctgctattggggaaggtatccagatcaataatgtcttgtacgagcatttagagagctatattgccaaattagaggaaatgggtgtgcgcatgaccatttctgaagatagcatctttgtagaaaagcaaacaggcttgaaggcgatccagattaaaacttctccttatcctggttttgcgactgatttacaacaaccgatcacacctttgctcttaacggctgcaggacgtgggcgaatcgttgatacgatttatgaaaagcgggtcaaccatgtgcctgaattggctaaaatgggggctactatcttgactttgaacgaccacattatctatgaagggccaaatcaattgacgggatcaagtgtgaaagcgacagatcttcgagctggtgcggctttagtgatcgcaggtctcatggcttctggaacaacagaaattacaaatgtggaatacatccttcgcgggtattcagatattattcataaattgacccaacttggagcagatatccagttgatcgaagagtagtgattgaatctgagatctggtagtggtgcctggatacatgaacattggagtttgaaatgaatatttggacgcacttagctgcctattcactgattgaaacacaaaggttgtacttacgaccttttctctttgaggatgcggaagatttttataagattgcttcgaatcctgataacctacaatttatctttcctgcacaagctgatcttgctgaaactcaatatgtactagccaactatttcatgaaaaatcctttgggggtttgggcgatctgtgataaggaaactaatcagatgatcggctccatcaagtttgaaaagttggatgaaattaagggagaggctgagttaggctactttttacgcaaagatttttgggggaagggcctgatgacagaggcggtcaaagaactggtcaatttatcgtttgagaaatttcaactgaaggagcttaagattattacccatgttgaaaatgcagggagtcaaaaggtcgctttaaagactggctttcgtctctttcgtcaattcaaagggagtgaccgctatacgcgtaaaatgcgcgattattatgatttccgcctaggtagaggggacttctatgagtaaacaccaagagattttagactatctcgaaaaattaccgattggaaaacgggtcagtgtccgcagtatctccaattttttgaatgtcagtgatgggacggcctatcgtgccattaaagaagctgaaaatcaaggaattgtagaaacgcgtcctagaagcgggaccatccgtgtcaaatcgaaaaaagctgtactagagcacttgacctatcgggaaattttagaaatcaccggttctgaaatattagcaggtgaggaaggtctcgaaaaagaatttaataaattttacatcggtgccatgacggaaaagcacgtcctagactatgtgtctgaaggtgggcttttgatcgtgggagaccgcactagcatccaacgattggctcttaagcatgacaatgcggtcttagtgacaggtggctttgaggtcagtgaggatgtgatagatctggccaatcaggtacaaatcccagtcatccgaacttcacatgatacctataccgtcgcgactatgatcaataaggccttgtctaacatgcagatcaagacggatatcttgacagtcgagcaggtctatcggcccttccatgagtacggctatctttctgagacggatacggtacgggattatttagatttggttcgaaagaatcgctttagtcgttttccggttgtcaatcagcaccagatggtggtgggggtcgtaaccatgagagatgctggagataaggcgcctcagacgacccttgataaggtgatgtcgcggactatttttaccactaatttgtccaccagcattgcgacgattagccaacggatgatcgctgaagattatgaaatgattcctgttgttcgtaataaccagaccttgctgggggttattacgcgtcgggatgtcatggatcggattagcaaggtgcagttttcaagcttaccaacctttagtgagcagattggccaaaagattcaaacagagaacgaccattaccaattcacagtggaaccaagtatgctggagaaaagtggtgttttggccaatgggatcatgatcgaagtgctgatgaaggttgttcgcaagatgatgcaacacagtgggcgtagcttgattgtcgaacagttgatcatcaactttttacaggctgtgcaggtggatgatgtgatccgcattgaaccccaacttgttcggcgaactagacgttcggccttggttgattttagcttgtatttagatctgcagctagtcgcgaaagcaaccattacgattaagattaattaaacaaaagaaatgaggagacaatgattacattaaaatcacaacgtgaaattgaagccatggatcgtgcaggagatttccttgccagcattcatattggattacgtgacttgatcaagccagggcttgacctatgggaagtagaggaatatgtccgtcgtcgctgtaaagaagccaatgtcttgccgcttcagatcggtgtagaaggcagtctcatggactatccttatgcgacttgctgtggtttgaatgacgaagtagcccatgcttttccacgtcatgtcattctcaaagatggtgatctcctcaaggtagacatggtcttgtcagaaccactggataagtctgttttggatgtatcgaaactagattttgataatgtggcgcaaatgaagaaatacactgagtcatacagtggtggcttggcggactcttgctgggcttatgcggtgggaaatgtttcgcaagaagtcaaagatttgatggacgtgaccaaagaatgtctctataaaggaattgagaaagcagtcgttgggaatcgcttgggagatattggtgcagcaattcaagagtatgcggaaagcaaaggctatggcgtggtgcgtgatttggtcggacacggtgtcgggcctaccatgcatgaagaaccaatggttccgcattatggtcgtgctggacgcggtcttcgcttacgtgaagggatggtcttgacgattgagccaatgatcaatacaggtacttgggagattgatacagatatggaaactggttgggcccataagacccttgacggtggcctttcttgtcaatacgagcatcaatttgtgattacaaaagatggtccagtgatcttgactagtcaaggtgaagaaggaacatactaaaactagagaggaaagaatggagctgaaggcaagtgtctggtttcgctctttgctcttttttagtaaaatggggaggtgacgaatgaaaaaggtcctacaaaaaatactgggacagccatttataaagggcttcgtgcgattttatcagagtgcagagtctgatatcaccagcattgcggtggcttattatttgctgatctccattttccctttgatgctgattgcagccaatattttaccctactttcatattcgtcccactcagattcttttaagcttacaaaaagttttgccagcctccttatatcgaatagtggcacagatgatttcgagtgtcttgaccaaaccttcgacaggcttactgagtttctcgattatttctgctttgtggatcttctctcagagcattgcctacctccaaaaagcctataacaagagttatggggtggaaaaggagcgtggtattatctgggggcgactctttagctttctgatcagttttgccttgcagggtttgtttggactctcgctgatcctttccatgtttgggaaaatgatcgttcgttatctctatcagaccttttcatttgatcggacgatttatgtgcgcttactgaatttgacagagccgaccatctatctcttgctttttgtcagtctggtcttgctctattacacccttccaaatgtcaaaattccaaaatttagatatgtattgccaggggcgaccttcgttgttgctgtcctgtatgcgatcttgaatatcttttggaaatatgtggatcgttatgtgagtcattttttagatgctcgtttcttcggttcggttgtcctagcggtcatcatgttctggttcatcttggtggcaaaaatcatgattattggttgtattttaaacgccagtatccaatttgccagagaagccaagttccaaacgcgcagtggagaaattgtctctaagttaaaatcagaagaagtggactttcggcatagagaagtttcacaaaaattaaagcgtcggttacgcttgataaaaaaagaaaaaacggaataagggagagtgggacagaaatcggtcattcgttagaattcgatttcgtcgtcccacctccgcacagttgagtagggctgtaaaagctgatgggatcagcgtagtagagcccactcaaccactgcgtcttgctcgacaattcaaaaataattgagaggctaggacttttgtcccagcctctttttttcttatctatttttattgcatttgcaacaaaaatgtattatactattgtcaatagtaaaggaggagtgggatgagtattttgcgtgagataggcatcattgcgcgagctctggattctatagcaaatattgaatttcgagatttggatttggcgcgtggtcaatacctctacctggtgcgaattgcggagcaacctggaattattcaggaagaactctctgagctcttaaaagtagatcgctcaactgttgcccgatccgtaaaaagactagaagaacgaggaatgattcaacagcgcccaaagggtgaaaaccttaaaacaaaggaatgggaattaactgaaaaaggtaagcagatttaccccttcattttaggggagcatctttactctgagacaactgccttaaaaggattttccaaagaagaagtcgcacagttagaagagtatctgatccgagttcgtgagaatatcaccttggattgggaactagtcaaaaaaggtcaaaaaagaaattatagtgaggtaaagcaatgaaagtgacagtcgatcaagcattttgggatttatttccaacagctagaattacagtaatgtccttgtatggtattgataatacagtagatgaagccaaggatccttatttcaaagaattattggacaagggtgccaagcgagcatgggaatttatcgatgaagaaaactatacccagagtgagttcgttcaagagtggcgccaagcttttagcaagtttaaaacaaaaaaaggagcccgatcttcaatcgaagcactcttaaaacgggttcaccagggacgtgaattctatccgattaatcctttggtggatctttacaatagcgtgtcgatggcttatgcccttccttgtgggggagaagatatggataaattggtgggtggcctctctctaggtcaagcgaaaggaggcgaacctttctttccattaggagctgacgaagatgcgccagctttggaaggggagatcatctactacgaccaagaaggcgccgtttgccgttgtttgaattggcgtgaggctcaaagaaccatgctaactgaagataccaaggacgctattttggtcattgaagccatcaacgaggagcaggccaaacgagcccaaacagccatgcaggaattgaaagatctagccaaggattattttggggttgaaggcaccatctatcaattaagtgcagagcatgcaagtatagaagtttaaaagaataaagcttgaaacaatcgtttcaagccttatttttgtttttaaagacaaagagtttactaaagacgtaattgaggaccacaatggccacttgtgcaaagagggtttcaatcagattgatttgactcttgttattgttgacaaattgcccgataattcctgggaattgcttgacaaaaatctcagtcaaggccatatctagaataaaggtcccagagcgcgcaattgcaaatcgaatcaagcgctgaaaccagccctttctttcttgtttaaagacaatggtatcgttggtcgcaaaggcaaagaggatcccagcgatgtttccaatcgcggtcgctaatcgttcatcacgagacacttgatagatgaagaggcgggttccgacggaaacaatggttgtggcaaccccaaaaaagagataggataaaatttcattatcaaaaaattttttaattagtgttttcataaattcagtctaccataaaacctcaaaatatgctatacttgaaaggttgaagaaatcaaaccttcaacccttggtgcttaagatcctttcgccaagcatattacacgcgggaaaaccgctaaaggagaataaatgaaacagttaactgctcgtgatatggcacaaattgccattgttgctgcgatttatatcgtattgaccattaccccacctctcaacgctatggcctactatggctatcaattccgtgtttcggaaatgatgaatttcttagctttttacaataagaagtacttgattgcggtgacgcttggttgtatgattgctaacttatttagttttggatggatcgatgtctttgtcggtggaggttcaacctttgtcttcttaggacttggactcattttatttggtcgattcaaaaacaagttcttgtttgacggtcttattcgcttggaccatttcttgtttgcgattttcttttccatctccatgtttacgattgccttggaactttattaccttcaaggccaaccattcttctataactggttgaccatgggattgggtgaatttgcatccttgatttttggagcgattgtgatcaatcaactttctaaacggatcgattttacaaaataagaaaagggagctttggctcctttttttcatgctaagaatgcagtaaattcaaggctaaattaagattttatgataaaataagaacatgaaaaccagaatgaaagaattagtggaattactcaatcgttatgcttacgagtattacacaaaagacgctccatctgtttcagatagtgaatatgatcaattatatcgggagttggtggaactagaaaccgctcatcctgatgagatcttaccagagagtccaactcaccgtgtaggtggggtggttttaaaaggctttaccaaataccagcaccagtatcccctttatagtttgcaggatgctttttcgcgtgaagaattagaagtctttgatcagcgtgtccgtaaggaatttccttccatcagctatgtatgtgagctgaagatcgatggcttgtccatttccctcacctatgaaaatggtgtcctcgtaacgggcgcaacacgtggagatggttctgtcggtgaggatattacagagaacctcaaacgggtcaaggacattcctttggtgttaccagagccagtgaacattacagttcgaggcgagtgctacatgccacgggcttcctttgatcgggtcaatcagatccgtcaagaaaacggcgagccggagtttgctaatccgcggaatgctgctgcaggaacacttcgccaattggatacgaaaatcgtggccaagcgaaatctcgcgaccttcttgtatcaagaagtgagtccgacggatcaaagcagtcaggaaggcgtgcttgagaaattagcccgcttaggctttgtcgtgaaccaagagcgagtgttggctgaggatatggagcaaatctgggactttatccaaaaagtagctcagcttcgggaggatcttccctacgacatcgatgggatcgtcatcaaggtcaatgacctagctgttcaagaagaactaggctttaccgtaaaagctcctaaatgggctgtcgcctataagtttccagctgaagaaaaagaagcaaaaattttatcagtcgattggacggttggacggaccggagtcgtgacgccaactgctaatctaactccagtccagctagcaggaaccactgttagtcgggcaaccttacacaatgtggactatattgccgaaaaagatattcatcaggatgataccgtcattgtctacaaggctggtgatatcattcctgcggtcttgcgtgttgttaaagataagcgagtctctgatcaagcattagccattccaactcattgtccgagctgccagagtgagttgcttcattttgaggatgaggtggcccttcgctgtatcaatccactctgtccagcgcagatcaaggaagggttgaaccactttgccagtcgagatgctatgaacatcacaggcttgggtccagctgttgtagagaaactctttgcagctcagttagtagaggatgtggcagggatctatcgcctaagcgtagaggatctattaaccctagaaggctttaaagaaaaatctgctgaaaaactccatgaagccattcaagcttcaaaagagaattcagctgagaagttactctttggtttggggatccgccatgtcggtagcaaggttagtcaaatcttgctccaagaattccatgacctcgatcaattggctacagctgatccagaacgaattgccagcattgatagtctcggtatggtcgtggctgaaagccttaagcgttattttgagcaagaaggatccaagcgtctcttgcaagagcttaaagaagctaatgtcaatatggcttatcttggtgagaaagttgctgctgatgcggccctatcaggaatgacagttgttttgactgggaagctagaacgactcactcgttcagaagccaaggcaaaattagaaagtctgggcgctaaggtaactggatcggtttccaaaaaaacagatttggtcgttgcaggtagtgacgctggtagcaaattaaccaaagcacaagaattaggtatccaggtagaagatgaggcctggcttgaaagtttatagaggatctttatggtagaacgaatcaaaaaagcccgtttaatttataatccgacctctgggcaagaaattatcaagaaaaatattgcggaagtcttggacgtactcgaagacgtgggctatgaaaccagcgcttatcaaacgactccagaaccattttctgcccaaaatgaagcagaaagagccgctaaggcaggctttgatttaatcattgccgctggtggagatggtacgattaacgaagtggtcaatggggttgcaggtctggaaaatcgtccgcagatggcctttatcccgaccggtaccaccaatgactatgcgcgtgccttgaagataccgatgggagatcctgtggcggctgctcgcattatcgaaaagaatcaaaccattcaaatggacattggtcgtgcctatggcagcaagtatttcatcaacattgctgcagcaggaaccatgacagaattgaccttcagtgttccaagtagtgttaaatctcgcttgggttactttgcctatgtagcagaagctgctaaaatgttgccgcgaaataaggctcgtaaggtacggattgagcacgacaatggtgtctttgaagggccagcgtctatgatatttgtggctttgaccaactcgattgccggctttgaaagtgtcgcgccagatgctaagcttgatgatgggaactttaccttgattatcgtaaaaactgctaagctctttaacatgttgtccttgatgattcaggccatcaatggaggcaagcatgtgcacgatgaaaatgtagaatatctcaagaccaagaagttgacgatcgaaatgttaggaaaaaatgctcaaccattccgtatcaatctagatggggagtacggaggagatactccagttgaattggaagtcttccataatcacttggaattctttgcaaatattgatgaaatcaacaacgatgctttggttcacccatctgaagaataaaaacaaatagttggagtccgttacgtgttttacaagcggatggttccttcggtattaaattggaaataggaaaatgttatgcgacaataccatgtaaagcttcattttcataagcaaaaaggaaattattttgcctatgatatgtggcagtggcaggatcaagtagaaggaaaatcagtctctttctccaagttggattattttggagtagaaggcaatctaatttatgagagcgaagaacccttgaaccggggccatgtcttggtcaaagaaggggattggctcaccaagacccgtgattttgaaatcgaacttttaccagaaggctatgttcgagaagtatggattctcgatggagacgatacagtctattattctttgcaagctgctttgacgagtcatgcctacagccatcgtcagcctcatgcctacgatatggcaatgcgtcctagagagtttgatgctaaatgggcgtatcaaggatggctcggtcatcgggaggaagaaggggagcattgctttaaactgtgggcaccaacggctaagaaagttgaattgttgctctatcaatcaaccgagctggatgcgcctatctggaagagcatgccgatgacgcgtggtaaacaagagtctagctaccacccagaaaatacccatggtgtttggattttagattttttaggaaatttaagtggcatggcctatcaatatcgtgtgcattttgaacaccatactcaagtgacgcgtgatccttatagcattgcaacgacagcggacgggatgcgctctgccattctttcaagagcagatcgtcagtttgattggggcactaaaaaaggcgccgatgcgactccttggcgcttggacaatccttgtcaagcagtgatttatgagatgcaccttcgggatttgaccaagtcaccgacatcaggtgtagacgaagtcctgcgtggaacctatctgggggcttgccaagaaggaaccgtcaatagccatggcgatgcaactgcctttgattatatccgtcagttaggggtcaatgtcgtgcaactgcagccgatttctgatcgttttaaacagtacgacgatgaaggccaggtgacctacaattggggctacgacgttcagaattattctgcaccagaaactagcttttcaacggatccatccaatccgaaacaaaccatgaaagagctcaaaaccatgatccgggcttatcatgaggcaggaatttctgtggtcttggatgtggtctacaatcatatctattcgaccgaacatggtcctttccaaaatacagtgcccgattattattaccggatggagccagatgggcgcttccaaaatgggacaggtgtggggaatgaaacggctagtgagcatgaaatgtaccgcaagtacatgattgattccctcacgcactgggtcaaggagtaccagatcgatggcttccgctttgatttgatgggcattcacgatgtaaggacgatgaatgctattcgggaggctatggatgctctggatcctcgtattctcctttacggagaaggttgggatatggggacaggtctcgcaccagaagacaaggctaagaaggacaatgcagcgcaattgccacgaattggattcttcaatgatacggagcgcgatgccattaaaggggctgaggtttatggttccatcaaacgtggcttcgtcagccgaaaatcgacagagaatatcgttgcgcgtgctgttttaggtagtgcagaacttggcaattatttaagtccgaatcaggtcttgaattatgtggaggctcatgataattataatctctatgacttgcttcagacccttcatccgaatgaagaagtagcaggcttggtcaagcgctcagagttggctacagccatgaatctgctctttcagggtatgaccttcatgcaattgggtcaagagtttatgcggaccaaattggtggcgacaggtcctgatggggaaatcacacctttggatcgtgaacgggccatgaattcctacaatgctccagattttgtgaatcaggtcaactgggatctggtcagtcagaacaaggaatcaattgcctatatccgaagcttgatcgccttgaagacaagtcttcctgtcttaggacttgaaagctatgataaagtctaccaacaagtctttattcaatctgcaactgataccagtggtcttgtcatctatgaactaacaggagacaagaagtacttggtcatcttcaacgccagcggacttccttactacctccaaaattcaaataaattgaaattgatggttgggaatagtcgtcataaacgaccattctacgtggagaatttaacagcttctgtttttgaagtcctagactaagttctttttaaagaaatcataaaatccctgagtttttaaactcagggattctttttatttagaagaactgctactggtctctgttgaggaagaactatcgtcttctgggtgcaattctttataagttggtgccttgaagagatcaacggtagactggttgccacgttggttataaaggctggttgatttgtcacctttttccttttcaatcttcttcaatgccttgaaggaattggtgtaggaataatcttctggattgacttttccaagatcattgcccttgaagaagcgaaggaggtcaccggtctggatgctatcgctaatcttcaattgcaggttagcagcttccctgatcttgtccagttcttccttggttttttcgtctgggttcgtaatttcctcacctgttttggtgtaataggtccggccactatagctcgtatactctggagttacaaagtagttagcagagcggaaggcgacgatttgatcatgatctggtgagagcatatcttgaccaacttggaggaatttgttggattcaatacctagcaaatgttccaaggttgggagcatatcaatttcgccaccataggtatcaatgatgccacccttatccatacctggaatgactaccatataaggtactcgttgcaacatggcattgtcataacttgaccacgtttcagagttcttaccaagtagaggagcaagagctgggttacgagagtttgaaattccgtagtggtccccatagagaacgatgatggaatttttgtaaagaccagattctttcaggtaatcaaagaatgctttgatcgaagaatctaggtagttagcggtcgcaaaatagccattgatggtttcgtcctgagtcttagctagagggaaaccaagatcatctcctgacaagctggttgtataaggatagtggttggaaaccgtaatgaacttggtatagaaaggctgttgcaatctttctaggtatttgatggaatccttgagcatgtatttgtcattaagaccatactggaaggaattgctgctgttttgtttggtgaagtagctggcatcaaagaagtaattgtagccccattgtttataggcggtatttcggttccagaaacttccagcatttccgtggaaaacagcgctcgagttgtaaccattttttgaaagaataaatggtgcagcctgttgggtattggttccaccatagttcaccataaaggaaccttggttgagtccgaagaggcctgtttcaatcatggtttcagcatcggacgttttccctgccttaacttggttaaaaacatttgaaaaggcaaaggtttctttcgagtggtaaagtgagtttaagaaaggtgtcacttcatattctttatcgtctactttcaacttgtaatcgatcaagaattgttggaaactttccaagtgaatgtagatgacgttacggcctttggccattccaaagtactcaggattaggcttggcataatgctgttggatatattcttccaccggttttaaatctgcttcggaggctttggaacgttctttgttagcagcataggtctgattagcgctataacccagaaaggctggtaagcctagggcacgaacgacatagtagtttgagaacccacgagtcaagagctcaggtcggtcaatttctgcgaggaaaaggttggccgaaaagagcatagccgataaagaggtaaccgcaaaactagctcgtttattgaagggacgattgtccattcgaatccatttcttaaagaagaagaaagctagaatagggaaatctagaatgtagatcacatcccaagggcggaacaattctaaagcagcagctccgagaccggcagaaaccttgctggaagccaacatggtattgactgttacgaagtctgtaaactctcgataatagatggagttggaaatcaaccaaataaataagagaaggtagatcccaaaggccaaactataaaagagtttggttcgtttgatataaagtgcaagaccaatgaagagcagactgatcggcaatgggttgatcactgctagaaaaatctgatagggtccttgaatgtctaaattaaaatcaactgaataggcccacatggttttgaaccagtagagcaacagaagggtcaagacaaatcctagtctggtactcatgaaattgagtatcgaattcgtaatttttttcacaaaatgttacttccttgtcttatttcctaaaaattttcatatacaagtataccacaattttatggagaaagaaaaaaatgactgtaaaggagaggaaagaaataggaaagatccggcattttatatcatttgaagctaaatgatgagaactaggataaaatggtaaaaaaagttccagtaaataaagcctctctttgtgaaaactgcagacttttgctataatagagggtatgaaaaaactcacagtcagtcggcaagtagctcgaaaattaaaacaaggacaatcccttcttgaaaagcaagattttgagtcacttcctgctttggatcaagaggttcaattgctttcaggagatggacaatacctcggagtcggatacttatctgaacaaaataaagggattggatggtttgtttcacaagagttggtcgcttttgatcaagacttttttaaaaagcttttcatcaaagccaagcaataccgtcgttcttattatgcggatgaaacgacgacggcctttcgtctctttaaccaagatggagatggttttggtggctttacggttgacttatatggtgagtttgttgttttttcttggtacaatcccttcgtatttcagattaaggaaaccattctagcagcctttcaagaagctttttcagaagtccgaggtggctatgaaaagattcgctttaaaggtttggactatgaatcggctcatgtctatggagaagaagctccgcaagaatttttgattcttgaaaatggggtctcttaccaagtctttctcaatgatggcttgatgacggggatctttttggaccagcatgaagtccgaggaagtttagttgaggggctcgctgctggtaagtccttgctcaatatgttctcttatacagctgctttttctgttgcagctgccatgggcggagcagtagagacgacttcggtcgatctggctaagagaagtagagaattatcagaagcgcattttgtggcaaatggcttggcgctggatgctcatcgttttgtcgtgatggatgtctttgactattacaaatatgccaaacgccatgacctaagctatgatgtgatcgtgcttgatccgcctagctttgcgcggaataaaaaacggacattttcagtcgctaaagattaccatcgattggtcagcgaggcactcgagattttaaatccaggtgggatcttgattctcagtaccaatgcggcaaatgtgaccaaagaaaaatttaaaaaacaaatcgaaaagggatttcaaggccgtaagcatcgctatctagcggaatacggacttccgggagattttcgatggaacaagaaagaagaaagtagtaattacttaaaagtatttacgattagggtggatgtatgaagttagttgtttcgattatgcctcgctccttagaagaggcgcaacaactagatagttcgcgttacgaggatgcagatgttattgagtggcgtgcggactttttagaaaaaagcgagatcttaactgttgctcctgcagtttttgaaaaatttgctggacgcgagattttattcaccttgcggactcgagctgaagggggagagatggagctgaccaacgaggaatatgttggaatcctgaaagatattcaatccatctatcatccggattatatcgatttcgagtattatagtcaccgtgaagtctttgaagagatgttggaattttcaaatcttgttctcagctaccataacttccaagaaactccggaaaatatgatggagatcttatcggaattgaccagcttttctccaaaattagtcaaagtatctgtcatggcccacaatgaacaagatgttcttgacttgatgaattatacgcgtggtttcaagacactgaaccctgagcaagaatatgtaacgatttccatgggcaaggtcgggaagatttcgcgcttgacagctgatttgacaggttcttcctggtcttatgctagagttggagatgaaagtgccccaggtcaaattcctcttgaaaatatgagaagaattcgggagttattaaatgaagattgacggatatactcggatggcagctgtcattgcccatcccattcgtcatagtatctctcctttcattcataatctagcctatgaattaacagcgaccaatgctgcttatctagcttgggatattgctgaagaagacttagaaagcaccatcagccaaattcgtaagttggatatgattggggccaatatctccatgccctacaagcagaaggtctttccttacttagatgaagtggatgagatggcccgaaagatcggttctgtcaatactatcgttcaccgcgatggtaaacttaaaggctataatacggatgggattggtttctttcgtagtttacctcctgctttctctattaagggaaaaacaatggttctcttaggagcaggtggtgcagctttagcgattattgcacaggcaattcatctaggtgtaaaacgaatccttgtctttgtgagagaggagagattggttcattatcgttcaatcgttcagttgattgaagatggctttgattttttgatagaattgtatgcgattgagaaaaatgaagacgttcaaagctcctttaaacaagccgatctcatcttaaatgccactggtgttgggatggatggtcagtctcttccgatagcgaatcacttgacgtttcctctacatgccttaatcgtagagatggcctactatccggcagtgaccccctttttgcaactagcagtgaatcaaggaaaccagagggtaaatgggttgggaatgcttttttatcaagctgaagcagcctttgaattaatgactgggaaagtatttcctacagagtctgtatgggaagcattgacaacagaatatcgccaatttgtatgtgactaagagaggggtttaccttttcctattgaaaaagctttatgagattagaacaagacctgatttttaaaaaaacagtcttgctctagtctctttttcattttgattgagacatgtgccctatttcatgataagatagaatcaaagaaaaacgtgaaggagattcctatgaacgtatcggtacctattccaggacattcctatgatattgtgattgaaagaggtggtctcaaccaggttggagattggttgcgcactctttggggcgataaaaaagtcgctatcatttccgataaccgcgtggctaagctatatgcctctatcgtagagaagagccttgagaaagctggttttcaagtggtgcgctttgagtttcttcaaggggaagccagtaagaatctaaccactgtttcaaaagtctatgactttctagctacccagggcatgacgcgcagtgatggaatcgttgctcttgggggtggcgtagttggtgatttggctggttttgctgcctcgacctatatgcggggaatttcctttgttcagatcccgactagcttgaccgcacaggtggattcttctatcgggggaaagacgggagtcaacacagcacttgctaaaaacatggtaggaacttttgcccaaccagatggtgtgtttattgatcctgaagtgttgagcaccttggggcaacgtgaattgatcgaggggatgggcgaagtcatcaagtacggtctcatccaagatactgaactttgggaagaattggaagccatggagggttctgtccagagtattttagagcatgcagagagcatcatttctcattcttgcctggtcaagcgagaccatgttgtggcagatgagctggacaatggcattcgactgtatcttaattttggtcataccattgggcatgccattgaagcgacagctggttatgggcaggttatgcatggagaagctgtcagtatgggtatggtgcagctgtcccgagttgcagaagaaaagggcttgatgccaaagggaattactcaaaaaatcgaagaaatgtgccggaaatttggccttcctgtgacctatgagaactgggataaagaagccctttatcaagtcttgacccatgacaaaaaggcgcgtgggacgaacttgaaattagtcattgttccagagttggggcaagcagcgattcatcaaatccctcttcaagaaatgaaggactttttagaaagaaaggaataaggtcgtatgagatatttaacagcaggagagtcccatgggcctcgattaacagccatcatcgagggcgttccggcaggccttcctttatctgaagaggatattgataaagagctcaaacgtcgacaaggtggctatggtcgtggtgctcggatgaaaatcgagagtgaccgtgtcgagatcacatcaggggtccgtcatggcttgaccatgggaggtccgattacgctgaatgtgaccaatctggatcaccaaaaatggctggagatcatgaatgtagcaccggtcgaagagaaaaagaaaaatctgcgtaagatcaccaagccacgtcctggtcatgccgatctagtcggagggatgaaataccgttttgacgatcttcgtaattccttagagcgttcttctgcccgtgagacaaccatgcgtgtagccgttggtgctgttgctaaacggattttagaagagatcggcgttgaagtagccagccacattgttaattttgggggaatcgagattgcaattcccgagaatctaaccgtttcagaaatcaaggaaaaggcaggtcagtcggaagtttcgatcgttgtgccagaacaagaagaagccgttaaggcctacattgaccaagtgaaaaaagatggcgataccatcgggggaattgtggaaaccttggttggtggtgtgcctgtaggactaggatcttatgtgcaatgggacaagaaattggatgccaaaatcgctcaaggagtggtctctatcaatgcctttaagggtgttgagtttggccttggttttgacgcaggtcgcctaaaaggcagtcaagtcatggatgaaatcatctggtctcaggacaccggctatacccgtcgcaccaataatcttggtggttttgaagggggtatgaccaacggtgagcccattctggttcgtggcgtcatgaagcctattccaaccctctacaaacccttgatgagtgtggatattgaaacccatgagccctataaggcaacggttgagcgcagcgacccaacggctctacccgctgcaggagtggtaatggaagcagtggtcgcaacagtccttgctacagaagtgcttgagaaattctcatccgataacttggaagaattgaaagaagctgttgctaagcaccgggactttacgaagaatttttaagagaaagagttttcctttggagaagaaagttgtatatattgcaggcttgggcttgattggtgcttcactcgcgctaggcattaagagagcccacccaaacgtgaccattcttggttacaatcgaagtgaagcctctcgaaccatcgcccttgaaagaggaatggtggatcaggtgacgtatgatttcgcagcctttgcccctttagcggatatcattattttggcccttcccatcaagcaaaccaagtcttacttagaaaccttagctggcctgaatttgaaagaccgggtactggtgacagatgcaggctctaccaaggcagaaattgtcgcacaagctgaaaaggtatttacagacaaggctgttcgctttgtgggaggacaccccatggctggtagtcataagacaggtgctgcagcagcagatgcaaccttatttgaaaatgcctattatattttcactccttccagcttgacgacaggaggtgccatggaagagttgaaagagcttctgagtggattgggatcccgctttattgaaatcgatgccgaggaacatgatcgggtaacctcccagatcagccattttccccatattttagcctcgactctggtcgagcaggccgtagcttatggggaagagcatgaaatgacccgtcgttttgcggctggtggctttcgggatatgacacggattgcggaaagtgagccaggcatgtggacttctattctcttgtccaaccctcaagcgatattagagcggattgcagatttcaaagagcgtttggaccaagtggctgaaaccatccaagcagataacgaggaggctatttggtcctttttccaagaagggcgcaagcaccgaaaagaaatgcagatccatcagcgtgctggacgcgatagtgcctatgatctctttatcgatgtccccgataaggaaggtgtgatcctcgaaatattacaacttctacaagggatttccttagtcaatattcacatcaatgaagaaaatcgggaggatatccacgggattttgcagctgacctttaaaaatgcagaggatcaagagcgggctcaaacattgatcagccaggcgacgtcttataccgtccttgctcgctaggtctacagaaggatttgcatcaaaaggcctgcttcattttaggaatattgaaggaaaaacagtataatagaagtatcttatcagtaaaggagcctagaaaatggcaaatatttatgatgtagcaaatgaactctctcggacccttcgagatcttcctgaatacaaggctgtcgtagaaagcaaacaagcgatcgaagcgaatccagaagcgaaaacgctgtttgacgaatacgtcgctttccaaaatcaactgcaaggcttgatgcaatcaggtcaacttccaacagaagctgtgcaacaagaaatgaaggactatatggaaaaaatccaagcaagtccgattgtgaatgaatttttcaccaaacaacaacaattgtctatttatcttgcagatcttgaaaagatcatctttgagccgattcaagatttatacaaatagaaatttctaccagagttgtcatttcgactctggtattttcgttcgccactagaggaaaacaagctcaaaaaatgcttggaaacattcgttttttgttccaaatttttgatcaaaaattgaattcatgtcctatttatgatagaatatgtggaaaagcactctggagatggcaatgaaattaagaaccaatagcaagggtctaaagggaaccattcgtgtccctggtgacaaatccatcagtcaccgatccattatttttggaagtcttgcaaagggcgaaactaaggtctatgatatcttgcgaggcgaagatgtgctttctaccatccaggtgtttcgagacttgggagtttctatccaagatgatggggatgtgattcggattcaaggagtaggctttcaaggtcttcaagccccgacatctccccttgatatgggcaattcaggaacgtctattcgtttgatctcaggtgtactagcaggtcaggattttgcagtgaccatggttggagacgacagcctttccaaacggcccatggatcgtgtcgcgattccactgcgtcagatgggggtagagattgctggtcagggagagcgcgattgcccacctttacatgaaaaagggacccatcagcttcaacccattcattaccgtttgccagtggcatcggcccaagtcaagtctgctctcatttttgccgctctacaagctgaaggtgaatcgacgattatcgagaaggaaaagacgcgtgaccatacggaggatatgattcgccaatttggtggagagatccaggtggatggaaaaaccatccgcatccaaggtggacaagagttccaaggtcaagaagtcattgttcctggagatatttccagtgcagccttttggttagtggccggcctcatcctgccagatagtgtgatcaagattgaaaatgttggcatcaaccaaacgcggacagggattctcgatgtgattcaagaaatggggggagatctcaccatggaggatcgcgatgaaaaagcggtctctgcaagtctcactgtcaagacctcgtccttaaaagggattcggattgatggggagttgattccacgcttgattgatgaattgccgattattgctttactagcgacacaagcaaatggtcagaccgtgattgcggatgctgaagagcttcgtgtgaaagaaacggaccgcatccaggtcgtagcagatagcctcaatgctatgggagccaatgtcgtgccaacggaagacggcatgatcatcactggaccgactcccctacatggagctgacttagagacctttggagatcaccggattgggatgatggctgccattgctgccttattggtgagtgaaggaaatgtgatgctggatcgggcagaggccattaacaccagttaccctagtttttttgaagatttggagaccttactgcatggctaaaattttacttggttttatgggaacaggtaaaacgaccgttggtcgcattcttgatccaaaattccatgatatggatgaattaattgttgaagaaatcggcatgtcgatcaatgactatttcgcagtggaaggagaagcagcctttcgtcgtcgcgaggctgaaatgctggagcgtttattggaaaacgaggcagccattatttcccctggtggagggattgtcgtcaatcctcataaccgtgcactcttggaaaaaaatcctcacaacatttatctgcgggtagattttgaaaccttgtacagccgcattcaaaatgacaaagccatgcaacgccccctctttttaaaccacaccaaagaagaattcaagaagatttttgatggacgtttgcctttgtatgaggatattgctacccatattgtggatgtcgaggacaaaacacctgaagaaattgcggagatcattcgatgcttgtaggctatcttggtcccaagggatcctttactcatgatgtggttactcatagctttccaacttctgaacgaatcgcctatcggacgatcacagatgtcatcaaggcttatgagaatcaagagattgattttgcagtcgtccccgttgaaaactctatcgaaggcagtgtccacgagaccatcgattacctctttcaccaagggaccatccaggccgttgcagaagtggtctatcccatcaagcaacagctcttggtggctagaaaagatcggcctattcgaacggtctattcgcatccacaagccttagcccaagggaaagcttttctaagggcccattatccagatgtggccatggaaatgacggcttcaacagcctatgcagcccgctatgtagcagaacatccagaattggagattgcagctattgcccctctggcagcagccagtgagtacggtttggaagtccaggccaaagatatccaagaaatcgaggacaactacacgcgtttttgggttttaggggcaaaagagcccttgatttcagaaactttaagtccggtccttcaaaaagttagcttggctttaaccttgccaagtaacctggctggagccctctataagggtttgtccacctttgcttggcggggaatcaatttaaccaagattgaaagtcgccctctaaaaacagctttaggagaatactttttcattattgacctcctaaatgaagcgcctgatcttgtgcactttgcctatcaagaattagacagtctgggcattcagacaaaagtcttgggtcagtatcaggtctataccataaaagataacggaatggagaaaagatgagtaacgaatccaactttctatctcaccatgagcgaaagcgattagagtacttatactcaaattttcattatttgaatgaacgagaacaactagaatacaattatttgctcaaaaaaagccaaggagtttatgaggaaacagaaccccttcaacagcctgaagtagctgctactgaagaagtgcaaggggagattgctgaaccgattggtgaccttcctgtttaccaatcacgtagcaaaaagtctaagaagaaagcagttgctgcgacgagcgatatacctaagaaaccacggaaaaagatccgcgtcaaacggattctcaagtggcttgctctctttttcttgctcattatcggtggcatggtcttcatgtttgtgaagggcctcaacagcaagccgacaggtccagatgccaagccagctgtcgttgagaaatttaacggcaagaagtcgcgagatggggtcaatatcctgattttggggacagatggtcggatcggtgagaagtcagatgagacccggacagactccatcatggtggtcaatgtcaataacaaagaaggtaagatcaagatggtcagcttcatgcgggatacactggtccatatcgatggtgtcagccagcaaaatattcctgaatatgatggctactacgaccagaagctcaatacggccttcaccatcggggagcaaaataacaaccaaggggctgaattggtgcgtcagatgctcaaagacaactttgacattgacatccaatattacgccatggtcgatttcaagacctttgcgacagcgatcgatacgctcttcccaaatggggtcgagatgaatgcgcaattttcaacggttgatggcgaaaaggtcagtgaagtagaagtaccagatgatttgaacatgaaagacggtgtcgttccgcagcaaaccatcaaggttggaaaacaacggatggatggccggacccttcttaattactcgcgtttccgtaaggatgatgaaggagactttggccggacccgtcgccaacaagaggtcatgtccgctatcatgcatcagatcaaggatccaaccaaactctttacaggatcagaagcccttgggaaagtctttgccatgacgtctaccaatgttcctttctccttcctattgaccaatggacttggactagtcggaagtgctggaaaaggaattgaacgagtgaccatcccagaaaatggggattgggtcgatgcctacgatatgtatggtggccaaggattgctcgttgattttgacgcttacaaaaagaaattgtaccaaatgggactgagatgatataataaggggataggagttttggactccaccccttttaatttgtagaaagatagaacaccatgttaaagaaaaatgaaattgtagacgttgagattgtcgatttgactcacgaaggagcaggagtggctaaggtcgatggcttggtcttttttgtggagaatgccctgccaggagaagtgatccgcatgcgcgtgctcaaagtcaacaagaagatcggttacggaaaagtagaggagtacttggaaaaatcccctcaccgcaatgaagagctagacctggcttatttgcgaagcggtattgctgacttggggcacctggcttatgcggagcagctgaaattcaaggccaagcaggttaaggatagtctctacaagatggcaggaatctctgatatcgaagtgcccttgaccttggggatggcccaccctgtccaataccgcaataaggcacaggtccctgtccgtcgtgtcaatggtcagatagagacaggcttctttcgcaagaactctcatgatttgatgccgattgaagacttttatatccaaaatccagtcattgaccaagtggtcttggctcttcgagatttgattcgtcggtttgatctcaagccttatgacgagaaggaacaatcaggcttgattcgcaatctagtggtccgccgaggtcaccattcaggagaaattatggtcattttggtcaccactcgtcccaaggttttccgtgtggaccagttgatcgagcagttgatcaagcaattcccagctattaaatccgtcatgcaaaatatcaacgaccagaataccaatgccatttttgggaaagaatggcgaattctctatggtcaagactatattaccgatcaaatgttgggcaatagcttccaaatctcaggcccagccttttaccaggtcaataccgaaatggcagaaaagctctatcagacagctattgactttgcggagttgagagcagaggatatcgtgattgatgcctactccggaattgggaccattggcttgtcagtagccaagcatgtcaaggaagtttatggagttgaggtcatcccagaagcagtggagaatagccagaagaatgctagtctaaatggcattaccaatgcccactatgtctgcgatacagcagaaaatgccatgaagaattggctcaaggaaggcatccacccaaccgccatcctggtcgacccaccacgcaagggcttgaccgaaagcttcatcaaagcaagcgcccaaacaggagcttaccgtattgcctatatctcctgtaacgtcgccaccatggcgcgtgatatcaaactctatcaagagttgggatacgaattgaagaaagtccagccggtggatttatttccgcaaacgcatcacgtagaatgtgtaagcttgttagtaaaatgcaactaaacctcaaaaggttcactgaaccttttgagtcccacaaacacatcacgtagaatgtgtttgtttgttagtgaaacgtagctaatcctcaaaaggtttcccaaaccttttgagtccacaaacgcaccatgttgaggcggtatcactgcttgtatgagctaagacttcagcgaagtagaagtaaatgatctcccatgcgataggactcgtagaatgagtagggaaaccgacgaaatgataaagcaagtccgaaccgctgagtgcgtggctcttctcttccgatctgagacagcgaaaagtagaaggggttggtattggtatcaatcaatgagtaacaaagtaacagcatgattcgaaacatttgcttgtaatttgtggaggaacatcaatatggatggaataacaaaagattctataaaaacggctaaactaatgaaacaattatggccccaattgaccgataaagaagctattgatgaagtaaaaaaatatacgaatggcaaaaatactgcaatctttactgaagttgaaggtgacacaattgtaggtctagcactatgttcactcagatttgattatgttgaaggttgtaaatatagtcctgttggattcttagaagggattattgtcgacgaggaatatcgtttaaaggatattgctaaaaatctctgtacaaaatgtgaggaatgggcgaaaaataaaggatgtaaggaatttgcaagtgactgtactttaacgaatacggattctataagatttcatctcaatattggatttcaggaggcaaatagaattattcattttaagaagaaattataatttcagaacgtggtcaaaatttatgtatctttagaaagtgtgaaagattggaagaacaaatttttttgatgggtggaaatccgccgataatgaaccatacaattgttaataaaattgtgtcatcaaggaagatcgaaagaattgtcatttttacagtttatcgagaaaattggcaaccctatatgaaaaagtacacggaagttttccaaagtcaatttcctaatctaaacactgattacttactcttggacactgagcagattgattttgataactatctagatgctgatgtcatcatcatcggtggtggaaatacggaaaagtatctagctacttatgtcaatcaggagttcaaaaattatatcgttcatatgctgaataaaggggcgaaagttatgggattttctgcaggagccctattattaggagaaaaagtctatgtttcacctaatgatcattcagatcatcagataaagataaaaaatggattaggactctttagtcagtttttaattagtgtccattatgattcctggaatgataaagctaataaggatagagctgaagaactcgttcatgttcccataattccactaaatgatcattcatgtcttgtattggataaacttggaaacattattgagaaaattgactagttttcattatctaaatcttgatctaggtaactaaagtgtagacaaactggatgggttactagtgaaaactgcaagaagtgttggaaagtgaatcggagagtgcttgatgaattttagtagtaagatagccataaataaaggctggtcagatgataaaaaatattgtgtgacagatcaaaatcagcaaaaatatttcttgcgtgtttctgataaggagaagttagattctaaaaaatttgaatttgatatgatggagaaagtggcttctcttggaattccgatgtgtaaaccgattagcatagaactctacgatgacgaggtacactctttacacgaatggatagacgggaaagatgcaagagaaaccattttaactgtttcgaaagaacaacaatatacttacggagtagaagcaggaagaatcctccaaaaaattcattcactccctattacagaagttcgtgaagattgggaggtcttttttaatagaaaaattgatgataaaatctccaaatacaaagaatgtcccgttcaatatgaaaatggtcagatctttattgattttttaaatgcaaatcgagaattgttaaaagatagacctcaggttttccaacatggagattttcatatcggaaatttcatgattggtgaagatcgtaaaatttatgtcattgactttgatcgatttgatattggagatccttgggaggaattcaatcgtattgtatggtctgctcaagtctctccctcttttgcgtctggtatgatagatggatattttgatcataaggttccggatttattttggaagcttctcgctatctatattctaaataacctagttggttctctgccatgggctgtaccatacggagctgaagaaatatcagtaatgcaacatcaagctaaggaaattttagaatggtatgatgatttgaatcaaatcattcctagttggtacttgattgagaaaaaggcttaataataaaagagtttaaatatcaatttgaaaaaatgtcaagattatttgcttatattatagcgaattcaattctttattaatacctatcgagaattatctttaaacttgaaatgttgttttggggtcaagttacatgaaagaatatattttaaatttagaaaaagaattctctttaatagaaaatggttttaaagaagaagagaaaagagctcttgctgactatcaatcaaacgataatgcatataccaaagaattagcatttttagcttttaaatccaatgtatatcaagttagaatgtatagtgtatttctctttggccatttgtcatcgtatgaagaaattttgatcttcatgagggatggggtttcaaaagatgaaaattggagagttcaagaagtattagcaaaagcatttgatgaattttgtaagcaaacaggttatgaaaaatctcttccggttattgacgaatggttacaaaacagtaatccaaatgttagaagagctgttacagaaggtttgagaatatggacgagtagaccatatttcaaggataatccagatgaagctattaaacgaatcgcaacattaaaagaagattctagtgaatatgttagaaaatcagttggtaatgctttgagggatattagcaaaaaatttccagagttgatcaaagaagaacttgatagttgggacgttaagagtaaagagattcaaaaagtttacaagttagcaagtaaatttattaagtgacaattatcagctataaagtttgaaaaatgctaactataaaatagtttcattctaaagtttaattttaaacaacaacttaatcattttcgttctataatatagaagtttactagcaccacacgtagagtgtgtgagtttgttagtgaaacgtagctaatcctcaaaaggttcattgaaccttttgagtccgcccatgcgagaaggtgccctggggtatagctgtcgtagagtaaggagtgtacgacgaaacggtaggtaaaagcgtaaaaaacttgtaataaaagggattgtaaaaagccttgaggtcaaggcttttctcgtgtacataggaaatattagagcaagagtataagtttagtatcttggtttgatagatggaattgttagggtttaatttccatttacccttttatttttctatgttataatattttagagtagacgtaatcagcttttaactcttctcttagagtgatgaattcgttcaataatctaataacaaagctaaactagtcactttttgttctataatatagatgctttctagcaccacgttgaatctgtagttctgctggtaaagcatagaaatctttgaatgaaatatttttaaagtgtttgtatcccagcaaagagataaaaaacgcctatctaagttggtaaataactttaggaggtttatacgttatgcttagatcttatgtaaccaagaagcacttattcttctattttgtggcgattatgattacttggctggaggctatcattacaccagctttgattcagtatattgtctctagttttaccaatcaccagttgcatttgctatggcaggtcttgttttgggggattgttggaaatttgattctcttgctgggtttggcggggaaacgttattactatgcacgagtgctgacagacttcaagtcgggtattaagaaggctatctttcagacttttctatatagccgtcggatagcggatgaagaagttttgtcagacttggaaaatgatgtaaaacagctagaagataattttattgagccgactgttattatcatttcttctttgggatttacaaccgtctctatctgttatgctctttggactaatttttatcttggcttgctctttatcattttttattcgatacctgttctttgtagtggaattggctctaaacgtttggataaaattacgaaggagaagtccttagctaatcaagcctatgtctctcaagcaaccaatatgatcgcaggtgctcgttccatacggtattatcggggacaaagcttgttttacaaactgttttctaaagatttgcacaaggctctaaaggaagaaatcgcctatgaaaagcaacggaccataaatagtctctttatcaatggaattgatgctttttgctctgttgcgcccattgtcattggtggtttcatgacctattataactacctatctgcagccagctttgtaggaatttacctcgtatcgtataatattggctatcaatttcaggagttatcttattttatcaatactagaaaatcagccaagtctctctgtgataaatatcaaaaattgttgggagtagacttggatatgccttctgttctcgaaggttccgtctttcctatccagttagagaaagtcagtgtagagcgtgatggtcaaaaaatcctagccccttgtgatcttactattgaggaaggtgaaaagattgccattatcggagaaagtggttctggaaaaacaaccttactgaacctaatctatggtgaaattgagcctagtcatggtcagattcgttaccatgggcaagagctaacctcggatgaactctatcaagcaggagcctacattctccagtctagtcatatctttgatggtttaagccttgaggaaaatattgctttgggacaagaacttgatactgtaaggatggatgaaatccttcggcaaactggtttgaaaactcttcaaaacaaaaatcttagcaaccagactctgtcaggcggtgagaagcagcgcttggaaattgcccgtgctctctatcacaatcgccaatttatcctagctgatgaggtcaaagccaatctggactttaaaaatcaagagaaaatcagtcaacttctcttctccctccctcaaacacttgtagaagtgattcatcactatagtgaagaggacttgaagcgctatgataaggtgataaaactggagaaataggtggaggtatagatttcagaaaggagtggcaggttcattcttttttgtgagatagataataaaaactctgtctaaatatatcagtacaataacgttaaacgagggatgtatctagtgaaagtcttacagtaaggagtttaaatatgaaattccatgaatttggtgataagaatttgcctcctatcttgctgatacatggcggtggcagttcttggtggaattatcttcgccaagcacggatcttatcagaagaataccgtgttattttacctactttgaatggtcacggtgaagagtaccaactcgattatgtttctacggaagattctgctttggagatcctagactatatcaaagaacactgtggcgggaagttgtttgcgattggtggtgtttcacttggtggtcaaattgctatggagcttttgtccttagacagcgaaattgccgagaaggccatcatagacggaagcctctgtattcctcaaccagggttagctaaactcagcatctttctagtatcactatttggtaaactgatgttcagtaaattctcttgtaaacttcaattaagcatgatgaacaaactctatcctaaactggcctatccagaggagataaaagcatattatttggaggatctgccaaggacgcctatcaaaacattagtgactatttacaaaacctatatggggcgttacaagctcaaggatacgatttctgctagcaaggcgcaggttctgtatatctacggtgaaaaagaattaaactgtgtgaaagcatcagcgaaattatttcagcagctccatcccaatacgatcctgtatgaagctaaaggctataaccacggctatttatcagcttatctacctcaagagtgggttgatttggttgagccatttttaaagagcgattcattggaaatgtttaatgaatctgatatgtaatagggaggaatctgatgctaggagcaatagttggagacattgttggttctgtttacgaatgggacaatattaaaacgaaagactttccattattgaactgcaccccaaaagttagacagaaaaaaatctaacttttggggtgtttttattatgaaattaacttatgaagataaagttcagatctatgaacataaaaaacaagggcgaagcttcaaagagctttcaaatcaatttgggataaacatttctaatcttaagtacatgattaaattgattgatcgttatggaatagaaatcgtcaaaaaaggaaagaattgttactattctcccgaactaaaacaagaaatcattgataaagttctgcttgaaagtcgttcacaaataaaggtatctctagattatgctcttccaagtgttggaatgttgcataattggatagcacaatataagaaaaacgggtatactattgttgagaaaacaagaggaaggatacctaaaatgggacgtaagccaaagaagaaacccgaagagatgacagaactagaacgtcttcaagcagaaaatgagtacttgagagcggagaatgcggttctaaaaaagttgagagaactccgattgagggacgaaaaagagcaagaagaaagacggaaattgtccgaggattggtaacagagtttgctttagagattcttctaaagattattaagcttgcccgttcaacttattattatcatttaaaacagctcgatcaaagcgataaggattatgatgttaaagttgaaattcaatctatttttactgagcataaagggaattacggctatcgtcgaatgactcttgaattgaggaatcgtggttttgtagtgaatcataagaaggtccaacgtctgatgaaggtccttggtttaagtgctcgtattcgtcgtaaacggaagtattcttcataccaaggagagattggtaagaaagcagataatcttattcaacgccaatttgaagcaaccaagccaatggaaaagtgctacacagatgtgaccgagtttgccattccagcaagcaatcaaaaactttatttatcgccagttttagatggttttaatagcgaaattatcgcctataatctttcgacttcaccgaatttagaacaagtgaaagctatgttagaccaggcctttactgagaatcattacacaaatacaattcttcatagtgatcaaggatggcagtatcaacaccagtattatcatcgttttttagaggataaaggaattcaaccgtccatgtcacgtaaaggaaacagcccagacaacggcatgatggaatccttctttggcattttgaaatcggaaatgttttatggttacgagaatacatttaagtcacttaaccaattggaacaagctattgtaaactatattgactattacaacaacaaacgaattaaggtaaaactaaaaggacttagtcctgtgcaatacaggactaaatccttaacttaaattatttgtctaactttttggggtcagtacatatttcgtgaggattgtttttttactgatgatacggttatgacctgtgctgttgctgaagccatcatgaatggcggtcagaaggatgactttattgatgccatgaagaagtatggtaggatgtatcctgatgctggttatggtgctaggtttgacgcatggattcatagcaatgaccgcgccccttataatagctttggcaatggctctgccatgcgtgtttctccctgtgcttgggtcatggcttgttgctattgtgcacgaacaggtacctggccaactagcagagctcttgctcgactttccgcagaggtgactcataatcatccagaaggcgtcaaaggagctatggcgacgtctgatgctatctttatgtgtcggtattactttgggggctactgtagtgactacgggcaaccaatcaatgataaccctatagagtgtaagaaacgtatcaaggaaaaaatagagaaggagtatggctataatctttctcaatctctgaatgaaattcgtcctagctatcgtttcaatgaaacttgtcaggatacagtacctcaggctatcattgcctttcttgaaagtacagattttgaagatgcaattcgaaatgccatctctcttggtggggatagtgatactcttgctgctatcacaggaagtatagcagaagcagcttatggcatacctgattggattaaagataaggcctatacctatcttgatgagcctttaaaagatgtgcttaggcgatgggagcaagaagtttcaataacataacagagattagataaagacaaccaaaaacactaaagcgacgagataagtaataatctcgtcgctttttgcttaatagttaatgttgctatggatttattcaggcacctagttagatttttgctgattcaagaggaggatacaagtcattactgagatacaggatacaagaatcagataccaaagattttcaagacccaagccatgatctagcatcaagcagtatccccaagaagcggggaaaagacgccctattcgtttaagaaaatcaggtagtaagttgctaggaaacatgattcctgagagcataattgagggtaaaaagacaagttgcgctatcatggtaagctttgcttgattttttacagtaaggcccagtatgcttccgatacttaacgatacgaaaatgtagattgacagtgcgagaaagaataggggaagttgactcggtagacttgccttaaataaaattggagcaagtagtacgatcgccatgcaggtcattatcaaatgaacaaaggcagagagaaccatggtcaccagtcctaagtgaataggcacaccatttgctttataaatcttttttatgtcgcttccgtatgtttcaatcaaggaaggcggtaagccgagaaaggcccccatggaaacactcatgacaatcattgactgtatgagtgtactacccatttcaggcataacggaagtaaaaatactacccatgagaagaaagaaaataagcggtacaatatagtaagtaaccaagagagacttacttcgtatgtccaatttccactgtaatgctaggctatataagaatcctttcattccgatcccctccttgccatttcgatgaaatgctgctccagtgtgccacgatccaccttaatatccagtatttggatatgtttctgtttgcattcttccaataatgaaatcaaagtgtcctcgatcgtatctgtttcaaaagatttctctccgtcctgggtctttaaatggatgaaatattttcttcccaacctgtctgtcagttctgaaggagtaccacaaaagacaatctttccactattcaaaatagcaatgcggtcacataaggtttcaacttcggccatatcgtgacttgccaaaacaattgtcttgccctgtgatttgagctttcggatttgttcatggagggatagtcttccttcaacatcaagtcccgctgtcggttcatcgagaaaaataatatccggattactgataagtgcaagagcaagatgtaatcttcttttttgaccggtggataattctatgtattgcgactccttcatttcttttatgccaagggcctttagcatagcatcatcaatgtatgtatgattccattttgcaaagagctttatggcttccatcggtttgatgtggatggatagagaggaggactgtagttgaattccggttttcccgtttacaattatagtgccttcatcatattttctcagaccttcgatacattcaagcgtggttgttttaccagctccgttcactccgagcagagcaaagatttctccttgtttgatttgaaaatcgagacctctaagaaccatattgctaccataacttttctttaatccagaaacctctatcgcgtttttcatggttctacctcctcaaggggattggttccaagccttgaaaaatagacttgtaaagcgggccctaaataatcattaacgattttttgcttttcttcccaagcgtttgaggcggtatcaatattccctatctccatcaacttcggaagcatgctcatatcaccatttgtaaactccataatcaagccccagtattctttcacaacctgttggcattgttcgctttcggctggtacgttttctttttgaagctctacgatttgatctcttaggcggttcaatctgtccataaagtcaagtccgcttttcttgtcaaatcgactgcgtatctggtcgagcgtatcatcatcaaagcgcttaatgagagagtaggagtcattcttcatctgtagattgacgatgatgtctgcatacttcttaaaattgaccgtctgtatttgtaaaacttctgcctttaactgctctattgcgactaaagaatccttaagttgctctatatttttacgaagaatatctgcttgctctgtaagagcattggcaacatcatcaggtgttttcaaagagatcaaacgcccctttatatccttgagagaaaagcccagtgattttaaagatagaatctgatggagtagcactaaatctttatcggtataaagcctgcgacctccctcactttctgccgatggggaaagtagcccctctttatcgtaatattgtagagtacggatggtaacgcccattttcttagcaagttccccaactgtcataaatccttccggaattgctctatatttagccataattacttccctcctcatacctattatacatcgttacgtaacgtcatgaacaaggagtttttgaaaaaatttgcttgacaaaaactttttcattttcgagaaaagaaagagaggtcttagaaaaaagaagaatgtgacaaaataagtccaaaatattgacataattcctagtctttagaatattattaatgggtacgtgtcatgatttagaaaagaaaagtacaattacaagatgatcaatagcaaacacaagaggctgggacaaaagtcctagcctctcaattgtctttggattatcgagcaagacgcagtggttgagtgggctctactacgctgattttatcagcttttacagccctactcaactgtgcggaggtgggacgacgaaatcgaattctaacgaattaccgatttctgtcccactctctttttcagtttaaaactatttgtcaccaattacgcactcatattttttatctcttacaacttttatttagtgaaagaggaatccatttttcacttgaatcccttctcatttgtatggtagaatgtatatacaaattgtatgtacaaaggagaggtagaaatggcaaacacgaaagcagtgaattttcgggcagatgcgatattttaccagaaaacaaaagaggtgcttgcggatcaaaaaatttctgtgtcagatgtcctgaatgcggcacttcgaaaaattgccaacgggactgtggatccagaagaatttgtttcgagtgatttgcagaacgcgcagtatcaagtagcctttgaagatttgaagaaggagattttagtggggcaccaggaaatcgctcaaggaaaagttacttctgtagccgatgtgagaaaggaatttggtcttgactaagttgaagcgctatcaggtctttcttgcagatcaggctaagcaggacttgcgtgacattcacgactatattcttgtgaatttttatagccagcaagctgcagatggaaaagttgatttgctattaagtgctcttgagaccctagaactgtttccagaagcctgtcctctggtatcaagccggggctatggtgagatgacgaatgatggaaaaccctatcgttatatgccaatagagaactatctcgcattttattatatggagaagcatacagtgtatgttgctcgtatcctcagtgcaaagcaggatttggtcaagattttttataagtagattgaggaacctccatgttaaaatcaaataagctaatcatttttttaatttctctaccctttctgatggtccttgttttctattctcttagtgagcatcctggatatagtgatgatgggaatttcgtcagaaatcatgagactgctattaagcgtgagatcatcgcaaacttagcccgggaaaagcaggacatagaatctgttaccttattgccaaatactgctagaggagagtatgataatggtggtgatgtgagtggacattaccatatctattttacagcctacgtcaatcataatcgcgagcgaacgataagcgtagaactattcttcccagatgccagcatcccccctttcaccttgtttcctcctaacccttataaagacaaaggcaaaaagatgtccaattgggtgatggggaatattgaagtatcggaagaaacctctagatagtatataaaagaaatcacaacgatagctacagacgtctatcgttttttaatgcttttaaagttgagaaaatagttttaggaaatgatgtcaaatatagttgacatccggcaactagtattgtaaaataaatgtatcaaatatatttgacacatatacatttaggaggtgccaagtgaaccgtgtgaaagaatacagagtcaatcttggactttctcaattggctttggcaaaaagtattggagtttccaggcaaacgattaatatgattgagaatgggaagtataacccttccctagatctctgtatcaatctagcaaaagagcttgggacggatttgaatactttattttggaggatcgatgatgatgaataaaaactggcaattgaaatgtgtgaaagctttctacgatattacaggtgagcttgacgaatacaaggaaaaagaattgagtacttttgggaacaacatgtacatgctctttatgtcgggaattatccttggattcctgctcagtttcatgtttaatacggattatgtcagtgtgatcacgtttttagtattttgctactccctgtaccaacaagagcaagtgattcatcgtttggaactcgacatctatgaggtttcagaagatgaagtaggagaggcaaagaaaaagatgctaaaaagaactttccttcaaaccttgattgtgatgggactagctatttttgttgcgattggtctttggagaacaggattgctacaagaaaataagataagctttgaaatatatttcacttttattttccctcttgtcattgggctgattaccatgattagtttcttgagtaatttcattgcaaatagaagaaaaatcaaagtgatccgggattagatccatcagaaataagaccggttatttttctgataagatagagctaaatggaaatagaaaccatttatgatgaaagaaaaagtaagaatgaatagaatagtagacgaacagatcactcttattccttattataggaatgatgacatttcccttctttggtatcaagatagtgagatttgcaaacaagtggataatactgatcagatttacgatgtaacaaaacttcataaaatgtatgattacctatcttcacatggttcttgctattatatccaatatgagggagtgttagttggagatgtgacacttcaagataattcagagctttctatagtgatcagcaaagagtatcagaatttacatatcggaagacgatgtgtttctgaaatgatacagttggccaaagagaaagaaatggttaaggtaactgctcaaatttatccttttaatactcaaagtcaaagaatgtttttggctttgggatttcagaaagtagatgaagagtggtatgaatataagttgatttagaatagttgtgtatcattttatgtattaaaataatagtcaatattttatacactaaagaatattaaagtaaaaataaacttattaaaaaatctaattgacataggaaaagaaattacctatcttctatgtttgtaaccgcttttttctgctataatatcactagatagaaatgtgggagtttcaatcatggttacaaaacggtttttgaaaaatgttattgttgcgatagtctcgatttttatgtccttggtcgttgttcaaggggcccaagctcagcaaactggactcgattaccaaagtcttaatctgctaccttttactggcaacaagcagctcgttctaggtgagtttgatcatttgggtcgtgcgacctccgctcatattcagctgcaggacaaggatgagccaaagaaaaaaagagaaccacggctcagctataatccggttggatggcacaattataaaatcgcatatggaaacaagggaaagaaggcctggttgttccacagagggcatttgatcggctatcagtttagcggtctgaccaatgaagggaaaaatctgattcctctaactgcctggaccaatacgggggattataaagggacagcggatagcaatgtggagggcatgctctactacgagaaacgactcgatagctggctagccacccaccccaattattggctggactacaaggtgactccggtctatactggtgatgaattaattcctcggcaggtgaccttgcaatatgtaggaattgatcgggatggcaaccttctgcctatccatctaagtagtcccaaagagtcagtagatgcttatgggatcaccaccgttaccttggataattattccaagaatgcgaccattgactatctgaaggggactgccaagccatctttagtgccgacagaaccaagtagccaaccacaaccgagtcagccagcagtgcctgcacagccagttcaacctgtcgagcctgcagagccaactcctcaactggctccagtagtttatgtagccagaaatgggagtgcggaagtttattggtattctttggacagtatgcctcgcaatactaatttttctaaggttgttcaaatgtcagaagagcaagcgctaagtcttggaaagcggcatacaagtaaggaatgaggatcagttattttgataataagaaagcccaattgctgggctttttgttgtagggtaagtactaaataggagaactaaaatgattgaaaatatgctataataataggacggaggtagaatatgaccttagatgtagataaagaaaaaatgatgattatgggtgtggtttttgacaacaaaaaggtttttaagagcgtctggtttgctctgagcaccaatatgattgaaggatggcatcccacggtagaagacgtggagcgactgagagaagaggcagttgcattaggagttggataatggtcagaaaaatatatgatgggtatgattatatagaccctgataatttgtacacctatccccattcatctgttctcataaataaatttaatgagaaaaatgataataaagcacgagaattagaatatcgtttagtagcaagtcaaagtttaaaactgtttattaatccaattgaagtaaatactgtttcagatattttaaagattcataagtttctttttgaaggaatgtatacttgggcaggtcaataccgtcaagtaaatatctctaaaagtggaaatgcttttatgccagttcagtcttttgatatggcagaaaaatttttaaatactttgctttcaaactatttacttaacgcaaataataaaattgagatttgtaaaagtttagctgagatattagataatctaaattattttcacccatttcgagaaggaaatggtcgtactcaacgagaagttatccgttctttagctttgatgaaaggttatgaatgtgaaatttcaattggtttagatgatgatatctatcacttatatatggatggaacagtttatggagatactagtaagctcgaacaactgttcaataaactattaacagaaatatagaactgtagtatattttagtaggaaacagtataaagtgatgcttataaggtaaagtcattgcttcaacaaaaatctttaagcccaatcgttgggctttttatgtgcaatacaatcttaaaaaagttagaagttatgaatgatctcctctaatatcttgcaaacctttttctaaagttgtatactagtacatgattttatgtaatcgtttgcataaactggtgaatgatgaaaagaatgtaaagtaggagacaagacagatggaattagcagctatttatcaccggcctgaatcagagtacgcctatctttataaggatgggaaactccacattcgcatcaggaccaaaaaagaggatatcaaacggatcgtcttgcattatggggatccctttatttttacagaggatctatatgaggaaactgaggagatggacaaggtaacctcagatgatttgtttgattattggcaggtttccgtagccgttggctatgcacggatccagtatctctttgaattagaagatacaaaagggaagaaggtcttgtacggagatcgaggtatggcttcctataacaaggagaaccttgaattcgtcatgaacggctttaagctaccttttatccatgagattgatggttgtgctgttccagattgggtggcgcagacggtttggtaccaaatcttcccagaacggtttgccaatgggaatccagccctttctccagaaggcgtccgtccgtgggatgcatcaattgctcctcaaatattggatttctttggtggagatttacaaggcattattgatcacctagattacttgcaggagttaggtattacagggctctacctttgtccgatttttgaatctccgagcaatcacaagtacgatactattgactattttgaaattgatcgtcattttggagataaggagaccttccaccagctagtgaaagaggcccacgcgcgtgggatgaagattatgctggatgccgtcttcaaccatattggttatgattcaccccaatggcaggatgtggtcaaatacggggaggattcgatttacaaggactggttccatatcaaagagttccctgtctcctcagaaaatctgtggaatagtcgcgacttgtcttaccatgcttttgcctttgcgggctttatgcctaagctcaatacggctaatcctgaggtgaaggcctatctcttgaaggtggcgacttactggattgaagagtttgatattgatgcttggcgactggatgtggccaatgaaatcgaccatcaattttggcgggatttccgtaaggcagtcttggccaagaaaccaaacctctatatccttggagaaatctggcattcgtcccaaccttggctcaatggcgatgagttccatgcggtgatgaactatcccctctctgaaagtatcaaggattatttcctgcgggggcataaggaaacgcaacgcttcatttgggagatcaatagccagtccatgtactataggcaacaaatctctgaggtgatgtttaacctcttggactcccatgatacagagcgcattttgacgacggccaaaggcgatcttcagtctgtcaagtctgctctggccttcctctatctgcaacgaggaacgccctgtatttattatggaacggagctagccctcatcggtggtccagacccagattgccgccgtgtcatgccatgggagcgcgtgtcagcggacaatgacatgctcaactttatgaaggaattgatccagctccgaaaagaagtagcaggcatgattcagtatggtaaagtgagtctggaagaagtagagctagatatactggcagtagaatggcggtatgaaggacagctcctcaaagcatattttaaccactccaagaaagacgttgtcttagaaagagaacaagcagatctgatcagccttgggagcatctctgatgatcaattggttatccaaccaaatggatttgttatttatagagaagattaataagaaagaagactggaatttaggtatttcagtctttttttataaatggtttctttattcgtacccttatattataatggagatgagaaaggaggagccggcgatgaagatgttagcaatcaatcctatttcggttaaaaaaagaatgatagaatttctatttgattatcttttcattctaacttatttagtttttctgtttataggttcgatgcttatttacatcattttttttaatggtgtcccagagtttacagaaattcagtcacagtggcttgtatttttaacatctattttgccaatcaccctcctgtttacatatttggattatgcaaaaaatgggagcttggggaagggaaaagcgggacttgagctggtctaccagaaaaaaacagtgcaagctagcttaatcagaaacaccattaaatttttaccttggcaaattggtcatatgggcacgattcatggtttctatagtaattttgacggattatccattagcctctctatttcggcgactctcctcgcagttttgctactggtaatgacgctgtttaggaaagataagaggcatataggtgacctgctagcccatacgcaagtgcaactaaaagaagaatagggtagagattgtttatcctatccttaaagaaaaagacaaacatagttaggaaatatctatatgaatgaaaacgtcgagtttacaaatctttgtatggtaagagatggcgatagagttcttgttattgatcgtaaaaaagaggactggccaggcataacctttcctggaggtcatgtcgaagcgggagaatcatttacggaagcagtaatccgtgaagtgaaggaagaaactggcttaaggattgcttctccccagatttgtggaatgaaagattgggtggaagatggcattcgttatgtagttcacttttataagacagaaaagtttgacggagacttaagatcctctgaagagggggaagtctggtgggaggacctgaaagaattgccaaaactagacctctccttagatatggaggatatgcttcgtattttccttgaagaagacctgtctgaatttttctactaccaagatggagaagactggaagtacgatttaaagtaaaattgaacgctgattctgaaaaaataacctgatccaagtgtaatagagcaaagtcccaaattgaaggtgatgagtaacttggtcaagaaatatgatcggaattgggataataactgtgttagatctcaccatgatagcatgcttagtctattagaaaccgagatagaaaaacacaaataagtgtggcttacccttggtctatttttcaattcgtttaattgtacttttacctacataggtgtataatgtgtccctaggtaaagaaaatagtagaataaggagattcatatggaattaaaagattttacagaaaaagaacaagaacagatcaaccaaggtttgagtacagctgatatttctgataaagaagcagctaagaagttgctcgctcttgtcccgcaggaatggatcaaacgaattcctttctttgtcagagggcatgcgacgaccaagactgttgagcgtgtagccaagcaataccctgaactctatgctgtggcgaaacgtcaaggggatcttcctgaaaaagaaggagaagagctccgcaagattatgacagctatctttgaagaaaagatgaacaaacacaagattaaataatcctttatgatttttatctcacaattgaacgagtgattgcagttgaaagattgcagtcgcttttttatacattgtataatgacttttacattagtaaataaaaatgaagaatatttcatgatataatacgaatgaaagtagttcaagaggaatgaaggattccattggagaaaaacaaataaaggtgttcattatgagaagatttttgacatttatttttacgatggttggaatgatggtagtatttgtagcttttatggtatatagttatgaaagaagttataatgaatggaaaagttcacgttcaggatcaaaaataacttatcctgtagaaaactacgcttcttcaagtgataggaaaaataatgatgatttagaatcattaatgaaaatgtttaagcaaagactttttcctataaccttactagaaccagtagataaagaggcatatgcaaaagctaaatcttggtcagagaaatctcctttatcgaagcaacaaattaaaatttatcttactaagtatggcatgtattcagagtatatttcccagtccgctgtcaataagcttaatatagactggaaagagcaggctgttttaagagcaaaatcatatcaaaagtttcattattcaaaagaaaagttagttgggcaacttgtaaatgttgatcgatttactcaagaagaggctgattatgctatagaaaaagttcatttcgattggaaagaggaagctgtgaaagaagcggaatcttctgcaaacggtggcaagatttcgaaagaacggttattagaaatacttgttgaaaatagaaaatttactcaagaggaagcggagtacgcaatagaacatgccaaaatagattggtctgattaaacgataattttaattttgatttttgtaacatattaaagagctggacagtctgccagctcttttttgttacttataaacttttctcatttcgtaaaaaaaagttggagcaaagctagttttaaactataatagaggaaaaggattatcgatatgaaaaatttatagaacaaacattttaatcaatagagaaggaaccagtttatgaaaccatctaaaaaattcatgctccttactagctgtgccttggcgatctttgctttagtggcttgtggtagcaaccaaaagcaatacaaggaaaagcaggcaagttccactgtacagaaatctagttcagataaggagcgctacaagggaagctacagcaacctcaacagcaaggcgagtgtcgaagaagtgcggactctcttgtctgcttatttggatcaggacagtgtagataaatttttgggtctggtaacagattacgatagcattgtcggctcggtcggcttaacgggtgacttcagcaccttcaagaaaacagactacaatgttgagaagatcagtgacttgtggaccaagaaaaagggcgatttcgtcgggaccaactgccggatcaatagctatactcttctgaagaatcgcatcgagatccctaagatgaaagcggatagtgaactcttgttcgtggacaatgatgccattgacaaaggcaaggtcttcgatgaggcagacaaggaagcctttaacattctgtattcacgggttccgacagaagctacaacggatgtcaaggtccatgctaagaagatggaagagtatttttctcacttcaagttcaatgaaaatgcgcgcatgctttctgttattgttcatgataacctagatggcaataccctttttgtcggtcacgtcggtgtcttggttcctgctaaggacggctatctctttgtcgaaaagctgacctttgaagagccctatcaagccattaagtttgcgactaaggaagatgtctacaaatacttggagaccaagtaccaagactacacaggcgaaggtctggctaagccctttatcatggataatgaaaaatgggttgagatgaagtagaggatgaaagacagcgtgttagaatttagaaagataatggagtatgctccgattctatatgtgctcattttcttgctcgttttcactgttctccttttcctgagaagaagggcaattgtgagacgtagtggaggtcccttctttgctcctttccatattagctatggaatcttctatatccatgtcgctctgtgtttcagtcgtcgcaggatcccgctgaaagagatcaagcaaatcacgtatgcaatttttcgtggacgatctggtggcggggctcgctatgctttctatattgaactcagaaatggaaagaccgttcccttcttttttggaaaaagtaagcggaatgaagctctggttgagaagctcaaacgaaatgctggcaggtatgggtttaaggtagatagcactggtaattattgaaagaaaaaggaatcacgaatgaatagaaagcaagccctatctatgtatttgttagggacctttggtcaagtattaggagtcagccttctggtttgttttttaagagcaggaggagtcaaggttgattttacatcatcatttgggatcttcgctattattgtaggtggcttatcatctgttttttgggggagtcttgcaagcattagttactatcaatctagtttcaaacaagttttaaaagatttttttcaagtcaaagacagtttggcaaattattgcttggtgctcgttttcttgttgcttgactttttcccatttatcttaggtggtaagatcaccactcaatcgttggtcttgccagtagtgctctttttcaaggctcttctttttggtgggattgaagaaattggctggcgttatttctttcaaccaactttggaggaaagaataccttatctttcagctacttttatcacctttttagcctggtctagctggcatcttttttacttttacattgatggttctttagctgtcattcagttgcttccgtttctagtaggtctgctaactaattgctttatcttatcggccttgtatcataaaacgaaaaatttatggctctgtgtcatgactcatgcctgtatcaattccttgtctcagatgatagtgaatgaagaggtatggctatctctagtcagtaaaattcttattatttgtttagcaattatgattgcaagaaagaagtatataactgtaaaggaggaaaaatgagcaaatttatttcaaaacaatcagtcgctatctgttatgcactgactgccctccttgctacttttatagtggggcaagttatcctttggtttttcccggatggaagtagtatgggtgcctcactactgtttatcctaatgaacttgattcccatgattgtggcggctgtcttttctctggtgttgagtgaagtcaactccttgggtgaatttttcaaaaaggtctttcttcaaaaagaaagttccctatcttggatcctagctttcttcatccccgtcatctattatgggatctccatcctgcttatgaacgttcgctttactgggaactccctcttggccttcttcctatacttcccttggaccttattatatggcggtctagaagaagtcggttggcgttggtttttacaagatcatctttcctttagtaagcactttatacctaaaatgatgcttctttccattgtctggttcctctggcatattcctatctatcaactcccttggattacagcaggttcgtccaactacctcatcttttacctgatgattttagggaatactttcctatttggagcgctcaaggagtactcgaaaggagctgttccttgtatccttgcccatatgctgattgatagtctagctgtcctcatgctggtacagagctctcttcctcagattatccttctagttattttcgaaattctagtatcctcttggctagtggctattcgaaaatcagagaaatagagttgtacctctcatctaatttcggtgggaggttttcttttttatcagatgataaaataaaactttttagctaataacgtattccatcatatagtacttcatagaggagtctgtaaaatgatataattagtttaacgaagaacttagagataggatcatcgtattaacacagtctgatccttatcaatcattcaagggggaaagaccatgcaaaaaacttttcagttgttgcgaagaggagatctagaggccgtccgtcagatattggataaaaatccagaagaagtcaatgctgtttcgggtgacaaacccaaaagagatcaagggcaatcccttcttcaagtcgctatcaaatcgggacatctagatattgcagacttactcattgatagaggggcagatcttaactttattgaagagccgacagagctgaatccattttgtcaaccggtcatccaaacagccggtggaagagctgtatttgactgcaggcgcatgatcaaacgttggaaaggccaatatgaaatgcattcgtctaaggaaaaggcggaccagtctttcaaggttttcgagaaaatgttggaacttggggcagatatctctcagaagaatagtcatgggggaaccttattacaaactatcttaatagaaaccaaagaagttctgccatcttattcttggaaaacaaaagaaacaagagataatgtcctcatcacggaggaattacgtcatgatttaaatcgtatttataatctcctgattcgttacggtgtgacttcggacgaaatttctgcctattataagatccctctcaaagaactttaccaggacagcccaaccatggaattcttaaatcgcttagatcagagcagatcttgataagcatttgaactactagttaaaagagccttagggctctttttgtttattataatgaggatagaaacagattgttttttcttttgggcaaattatggtactctaaagatagaataatggaagggttttctgaaaatgcatttagctgatttaatggaaaaaagtgagggtggacagtttttaatcttgtcacatctgcaacagcattccccaagtagtctgtcagaagtgatggctgagacggaattttccaaagcaaccttgaacaaatatcttgcactgattaatgacaaggcccaaaagaatcagctggcccttttcattgaggtagaagatgaaaatcttcgccttcttgtaggttcggataccaaggggctggacattcggcgggcttttttggacaatgctatcaagtaccaactattgatctatttactttatcatggccaatttcaagctcaacaattagctcaggagctcttgattagtgaagcgacattagggcgtcatatttcgggcttgaataaattattaactgagttttcattttcaattcaaaatgggcgcttgaaaggacctgaacataaaattcgttatttttattttggcttgttacgaaaagtttgggctagtgcagactggaaacaagaactgaacaggaaagaaagataaactgaaattgcaaccttagaggaggtgtgtggtgcccagttgtctcaaggccaacgcttggattttgttctctggtctcacattacccagcaacgactaaaggtcaatgcctgtcagttccgagaaattgaacagaagatgaagggctatacagacaacattttttaccaacgcttgtttcgtcgagtagaccagctcttttctgggagacacattgcccttagtcatgatgatggagagatgttggtccactttgctttccttgttacccatcggatcctcccgcttcatactatggagtacatcttaggctttgggggagagattggggctttgactacgcagctcattcaagagatgaaaacgcagaagcttttaggagagtatatagagggtccagtgacctatgaattgagccaaatttgtgggcaggtttatctttttacaggctaccttcttcaagacaagtataagtaccaacttgaaagccacaatccttatgtctttagtagtcatgattatagagaagtagcagatactatcttcagcaaacttccgatcttttgccaaggaacagctctggataaaaaaatcaagtgggagtggctccagttaatggattatatcgcagaaaatagtgggagacaaattaagatcggcttagacttaacagtgggctatttaggctatacacggatgacagaagtcctcaagcgctacctagagtacaatcgttttattaccattgaagcttttgatccagcttcagattacgatttgatcgtgaccaacaatccgattagccttacccagcggattcctgtctattatttaaaatatgatttagatatgatcgatctagccaatattcgccagatgatctaccaagaagaaggtcaataaagctattcaatgcttgatgagacttttacgatattattgagctgagttagaagtaataaaaaatttgaggttaggcagaacaaattcaaaacgaattgttcctcctagcttttttattagatttttctaaaaatttcattttttctaagtcttaaaaatccttatgaaacaagggttctgaatccatctactcaatttttttaaaattcttaaaaaaattgatgatcatgaaagcggttttttttgtataatagacaatgtaaggagtacgtctcctaaagaatatttctttttcccaggaggacagttcatgtcacaagaaaaatacattatggccattgatcaaggaacaacaagttctagagccatcatttttaataaaaaaggagaaaaagtaagctcaagtcaaaaagagttcacgcaaattttccctcaagctggttgggttgaacacaatccaaatgaaatctggaattctgttcagtctgttatcgctggtgcctttatcgagagtggcatcaaaccaggacaaatcgaagctatcggaattaccaaccaacgggaaacaaccgttgtttgggataagaatactggacttccaatctacaatgccattgtctggcagtctcgccaaacagctcctttagctgaacagcttaagagccaagggtatgtcgaaaaattccaccaaaaaacaggtttggtcattgatgcctacttctcagcaactaagattcgctggatcttggaccatgtagaaggagcacaagaacgtgctgaaaaaggagaattgctctttggaaccatcgatacttggttggtttggaagttgacagacggagcttctcacgtaacagactattcaaacgctgctcgtaccatgctctacaatattaaagacctaaaatgggacgatgagatcttggaaatcctcaatattcctaaggctatgcttccagaagtgcgttcaaactctgaaatctatggaaaaacagctcctttccatttctacggtggagaagttcctatctcaggtatggcgggtgaccaacaagcagccctctttggacagttggcctttgaaccaggtatggtcaaaaatacttacggtactggatctttcatcatcatgaatacaggtgaagagatgcagttatctgaaaataacttgttaactaccattggatatggaattaacgggaaagtatactatgccttagaaggatccatctttatcgcgggtagtgccattcaatggcttcgtgatggtcttcgtatggtggaaaactcacctgaatctgaaaaatatgcgcgtgattctcacaacaatgatgaagtttatgtggtaccggccttcacaggtctaggagcaccatactggaatcaaaatgctcgtggttctgtctttggcttgactcgtggaacaaccaaagaagactttattaaggcgactcttcaatccattgcttaccaagtacgggatatcatcgatactatgcaggttgatgctaagacggctattcaagtccttaaagtggacggtggagcagctatgaataacttcttgatgcagttccaagcggatattcttggtattgatatcgctcgtgctaaaaacttggaaacaacagctttgggggcagccttccttgctggcctgtcagtcggctactggaaagacctagatgaattgaaagaactcaatgcaactagtgaactcttcgagccttctatgaacgaatctcgtaaagaacaactctacaagggatggaagaaagctgttaaagctacccaactctttgcagaaattgaagactagtcaagacttcagtaggatagaaagtgaagaattatggaattttcaaagaaaactcgtgaattatcgattaagaaaatgcaagaacgcaccctggatcttttgattatcgggggagggatcacaggtgctggggtagccttgcaggcagcagcaagtggtcttgaaacaggtttgattgaaatgcaggactttgcggaagggacatcaagccgttcaacaaaattggtccacggtggacttcgttacctcaaacaatttgacgtagaagtggtatcagatacggtatcagaacgtgcagtagtgcaacaaattgctcctcatattccaaaaccagacccaatgctcttaccagtctatgatgaagatggggcaacttttagcctcttccgtctcaaggtagccatggacctctatgacctcttggcaggtgtcagcaatacaccagcagccaacaaggtcttgaccaaagaagaagtgttggctcgtgagcctgagttgaaacaagaaggtctagtcggaggtggggtctacctagacttccgtaacaacgatgctcgtttggtgattgaaaatatcaaacgtgccaaccaagatggggccctcattgccaaccacgtaaaagcagaaggattcctctttgatgaatctggtaagattacaggtgtagtggcgcgtgatctcttgactgatcaagtctttgaaatcaaggcacgattggtgattaatacaactggtccttggagcgataaagtgcgtaacctctcaaacgatggagagcagcattcacaaatgcgtccaaccaagggtgttcacttggtcgtagattcaagcaagatcaaagtttctcaaccagtctactttgatactggtcttggagatggtcggatggtcttcgtcttgccacgtgaaaacaaaacttacttcggaacgactgacacggactacactggcgacttagagcatccaacagtaactcaagaagatgtcgactacttgttaggaatcgtgaataaccgcttcccagaagctcacatcaccatcgatgatatcgaaagtagctgggctggtcttcgtccgttgatctcaggaaacagtgcttctgactacaatggtggaaacaacggcactatcagtgatgaaagctttaatgctttgattgcaacagttgaaggctatctttctaaagaaaaatcgcgtgaagatgttgaatcagcaatcagccacttggaaggcagcacttctgaaaaacatttggatccatctgctgtttctcgtggatcaagcttagaccgcgatgacaatggtcttttgaccctggctggtgggaagattacagactaccgcaagatggctgaaggagcgatggagcgtgtcttgaccattctcaaggaagaatttgaccgtcagttcaaattgatcaactctaagacctatccagtatcaggtggagaaattaacccaacgaacgtggattctgaaatcgaagcctttgctcaacttggcgtatctcgtggcttggatagcaaggaagctcactacctagctaacctatacggttctaatgcacctaaggtcttcgcccttgctcatagcgtggaacaagcacctggattgagcctagcagataccttatcacttcactatgcaatgcgcaatgaattggcacttagcccagttgacttccttcttcgtcggacgaaccacatgctcttcatgcgagatagcttagatgcaattgtcgaacctgttttggatgaaatgggacgcttctatgaatggtcagaagaagaaaaagctggctaccgtcaagacttgcaagtcgctttggaaaacaatgacttggcagcattaaaaaattaagaaaaacaaaaaggggttggaaagaagaatatctgaccggcccctctttataatggagaaataaatcatatgaaagaattatttggtgaatttttagggaccttaatcctgattcttttgggaaatggggttgtagcaggagtggttcttccgaaaacgaagagccataactcaggttggatcgtcattactcttggttgggggattgcagttgcagtggcagcctttatctctggcaagttaagtccggcacatttgaatccagcggtgacaattggggttgctcttaatggtggactagcttgggcatctgtgattccttatatcatcgctcaattcgctggagccatggtagggcaagtccttgtctggttacagttcaaaccgcattacctagcagaagaaaatcctggaaatatccttgcaaccttcagtacaggtccagctatcaaagacactacttccaatctaatcagtgaaatccttggaacctttgttttgctattgaccatctttgcacttggtctttatgaccttcaagcaggacttggtacttttgccgttggtaccttgattgcagggatttgtttgtctctcggtggaactacaggctgcgctctcaacccagctcgtgacctaggacctcgtatcatgcacagcctccttcctattcctaacaaaggagatggtgactggggttacgcttggatcccagtagttggtccaatcatcggtgcagtacttgcagtagcagtctttaaaatgttttaaaaaatgaaagaggctgggacaaaagtcctagcctctcaattgtctttggattatcgagcaagacgcagtggttgagtgggctctaccacgctgatttcatcagcttttacagccctactcaactgtgaggaggtgggacgacgaaatcgaattctaacgaattaccgatttctgtcccactctcttttaaaatactgtatcagataaagagagctttgtacgttctaacttaaaacaagctataagaaatgtaaaacgcaataaagaaaataatgatcgcaataatgtattgaactggtttaggtaggttattcaatttatccatgaattctttcattgttagatctccttattatttgattgtcttataattagtgtagcatgaaataaggcccaaaacaataggcaataggagtgtttttgtcaagatataaaacccttttcaaaattattataatcagttaatctattactaaataaagataagatagattgtaaaatactttagaaaataacaggctagagtttgacacttttttcacaaaggagtatactgttagcatagttttggaaggaacttatgatagattcacccaaaactgactgtcaacctttgctgttcttctatgaacgtttgctggtatcggggataccaaggaggaatcatatgtctaaagtagctattgtcacaggtgcaggtcaagggatcggttttgcgattgcaaaacgattggtacaagatggcttcaaggtcggagtcttagactacaatgctgagacagcagaaaaagcagtagctgagttatcagcagagaatgcttttgcggtcgttgctgatgtctccaaacaagctgaagtggctgcagctttccaaaaagttgtggatcatttcggagatttaaatgttgtcgttaacaacgctggtgttgctccaactacaccacttgatacgattacagaagaacaatttgaacgcacttttgccatcaacgttggtggtgtcatctggggtgctcaagctgcacaagctcaattcaaggcgcttggccatggcggaaaaatcatcaatgcaacttcacaagcaggtgttgtaggtaaccctaacttgactgtctatggtggtactaagtttgcagttcgtggtatcactcaaactttggcacgtgacttggctgattcaggtattactgtcaatgcgtatgcacctggtatcgttaagactccaatgatgtatgatatcgctcatgaagtaggtaagaacgcaggtaaagatgacgaatggggtatgcaaacattcgctaaagatatcactttgaaacgtctttctgaaccagaagatgtagcagcagcggtcagcttccttgctggacctgattcaaactacatcacaggccaaaccattatcgtggatggtggaatgcagttccattaagatgaaaaaaagaggtgggatcaacatcctaacctcttattttttatgctatttcgttaatacaatggtatcagaaggatcgcgatcgtcatcttcaatagtgagttggttaccttctagtttgtaaaatttgagatcatcccctacagtaagagtatgattgtcagcgtgaatggttacaggcttgctttctttctcgccatcactttcaacctcttcccatgtgccagttgtaccagagagggtcaaagtgatctgatcagtttcatcagtccctttgtatgtaccatcaagattttcaccctggctagcagtttgagaatccttagagtttgaagcgcttgatgcgatctgttgtgaactagcagagcttgcaggtgtttgagctgtctggttcgagcaggctgctaaaagaccaagaactgccagtgaggcaagagaaagtgtgaatttattggacaatgtcataggcttgtctcctttctttgatacccaaagtatagcaaaggaagaaggagaactcaatgaaaatgacttttctgaaagagaatgaatccctcagttagcatgaaaacattagaagatgtagtttctgacacgattagaataagaatggcgaaaaaatgtaaccgttttcggttgacattctatctgctaattagtataatgggtgtggaataatataaaaggcaatgaggcctatgattgcaatggcgcaaccgtttcaaatcataggtcctttattgccttttttctaattaaattttattttggaggttttcttatgaagaaacatcgtctctttttcgtttgtggtttagccttatttatggttgggtgccaggcttctcagtcatccaaaacaacagagcctagtaaagctaaacaagaaacaagtgtttctaaggaagatcaagtactcaatcgtggtcagtgggaggataagctatataagaaattaagcaatgtcattaaagataatggtaaatctagctctaaatatgatgaatcagcaaaaccatatgctgtatttgactgggataacacaaccgtcatcaatgatatcggtgaagcaaccttcacttatcagatcgaaaacttggaatttaagatgacaccggaagagttagataaggctattcgtacaaatatcccagaggataactttaaagaagatcataacaataaacaaggaaatcctgtcaacattgataagattgctaaggatatcgtttctgattatactgttctttataacgaatacaaaggtttcaaggggactaagagtcttgatgaagtgaaacaattagacgaatataaagatttcagtgctaaattacgttatctttacgaagcaattggtggaactttcagttcagatatttcttatccatgggttacctacttatttacaggtatgacttcagaagaagttcaagccttatctgaaaaatcaattgaacgtgccttaaaagaagatttagtttatgaaacttgggtgagcccagaaagcttgaagggtgaagctggtcaagtagaaatcaaatttaaacgtggtgttcgcgcagtaaaagagatgcaaaatctttataagacactacaagataatggcatagatgtttatgttgtttctgcttcattccgagatgttgttgttccttttgctactaaggaaaaatttggatataatattactgaagaccatgtctatggaatggaactcgttaaaaatgattctggtgtcattcaatcagaatacaataacgactacttccaaacacaaggtgaaggaaaaacaaaaacaatcaagaagttcattgcagataaacatgggaaccaagatcctattctaattgctggagatagtaatggggactatgcaatgttgaaagattttgaaggattacagatgggaatcatctttaacctattacgggatccatctaaaggaattggcttactttcacagactgcagtagatacatatgatagcaaagatgccaaatacttcttacaaggtcgtgatgaaaacaaaggtgttttagttaagagtagagaaacaatcaagttgggaactgatgaggcacaattaattaaaaaataggggagatttatgaagaaaatcatgtttgttggttcagtgggagtgggtaaaacaacgctaacccaacgattaaaaggattagatattgagtattttaaaacgcaggctgttcaatttcacgatagtattattgatacgccaggggaatttttacaacacagacgctattacaatgctttaacagtgactgcagcagaagctgaaatcattggactcttaattgcagggaattcaaccatgcaaacttttcctcaaggattttcttcattattcacccaagatgtgattggaatcattagtaagattgacctagtagactctgaggagcaattggaatttgcgcgtaaacaattgttagatgcaggtgttaaacaaatttttgagatttcttcaactgaaaatactgggatcgatgctttaaaagactttcttgagagtgagtaaacatgatataatctaaaaggactactttatctttcaagaaggagatgtgtatgattgttgaacacggagggaatggacgtctattagctgaaaaaaatggaaactcttctgaaaagtggattgattttagtgccaacatcaatcctcttggagtttccgaaaacctccgccaagtcttagtggagagcattgatagaattacagagtacccagatatcacaaaccaatatgaaaaagatttacttagagaccatcacggtaatcatgatctagaaattcttttgtcaaatggtgcggtaggtttattttatgagttagctcagatcttaaaacccaagagattactgattttaagtccaacctttatggaatatgaaaaggctttttatcaagaagggacagaaattatttatcatcatttaacatctcctaattttgtttggacagtgaaagatcttttatcagacatggatcatttgaaagcaggagatgttgtcttattatgtaatcccaataatccaactggatctgttgttccagttagtcaattgctagaaattgcgaaaaaattactggaacggaatattcattttattctagatgaagcttttattgactttttagaagacgaggaaaagtatagttttgttccatatttgagtgagtttacaaatacaattgttgttcgatctctaaccaagttttatgcgattccaggattacgattaggatacgcccttgggaaacatccatgcttaacaaagattaatgaacgtagggctccgtggacaattaatgcactggctcttcaagctttgcctgtgattttaaaggatcaggattatcaagctcagactctaaaatggttacaagaggaaaaagacttcctgtatcgttctttggaaactttttctgcattaactgttttaaaaccaagtgttaattatatcttttttaagtatacggggtctaagaatttacgtgaagaattatggcgctataacatttttatccgctcctgttccaactaccgtaatttaagtagtgattactaccgcgttgcaattcgtagcagagaagagaatacctgtttattagtcgccttgaaagcgattcttggaggacatgagtagtggaagggacaatgatagcatcttgtccaggatcttgtggagaattattccaatgtgttgtagatggtcgtgaatttttgatgtcttatggcattgaaaagaaaagccaagtattaattggccctcaaacaggtgtagtaggagaagagttgcgtcctaaaatgctgcgagttataaatgaattaacagatcagatagatttcgacttctcttttcaaacagatatctctgttggaaagggatattctagtagtacagcggatatgctgtcaattttaggtgcttatttttcttgcaaacaaaaggaagtgtcagtccctctgttaacgagcttatgttctaagattgaaccaagcgattccgtcggtttttcagactggactgtgatgaatcctcttgacggtgcgatcaaatggcagacaaaatggaaaccgaatctttatgtgtacattctagagccagatcaaatcgtcgatacaacgagtttcataagaatgacagatagtcccttgtatcctgctaagcaatcaaagaaattgctgattgatttcaaaactgcctgtgacaaacaaaatgtgaagctattaggtaagttggcgactacaagtgccttgttaaataacaaacggttgcccaaaccctatttagaagaaattatagaaattacaacagaattaggtttactaggagtaaatgttgctcatagtggtagcatcgttggtattctgttgactcaagatcagctgattcacttgaataagttagaagaacgactttcccaacatcctctggcaagctattattctataaggaatctaagcaaaattatatatgatgggctaaaagtgaagaaggtggaggaaatctgtggataggcaagatgaattaaatcaaatcctaaaaaatattgtaccgattgatgctaaagcattagaagagggaaaaaactattgtgatcgattagcgaaacctctaggtgcattaggaaaaatggaaaaaatgtatgctagattacatgcgatgttccctgacaatatccagttgacgaagaaaatggtcatgatttatgtagcggataatggagtttgcgatgaaggaatctcctcaaaccctatcgaaacaacatttattgtagccaataatattagaaatgggaaagcaggggtggctaatattgctgaatatgcgggttcagatatttgcgtcattgatattggttgtaaaagcccaatctatcctgataatccagaccatattctaaatggaacacgaaatatgctaaaggaacctgccatgactcgtcaggaggccctagaagcgattttggttgggtatagaagaactgttgaattgattaatcagggctataccttatttgggactggtgagatgggggttggaaataccacgacatccgcagcagttattgccgcaactttggggctccctgcacaagaggtgacgggatatggagcgggtgttacggaaaagatgaaggctcataaaacagcagttatccaagaagcagtaaccaatcatgcaccttatagtgatatgattgatctggtttcaaaagttggtgggctggatatgttgggaatggttggcacctatctagcatgtgcccaacatcaactgccttgtgtcatcgatggactgatttctttaacgggactcttgatagcttctcaattaaagaaagaggttttagattattgcttcccatcgcattgttcaacagaaccaggatatcgaatcgtttctgactacttaggattatcccctatgcttcaaatggatatgcgtttaggagaaggttctggctgtcctttagctttctttttaatggaaagttctgtatataccatagaacatatgccaacttttgaagaaggaaaattggaccgggatgactatgtcgatattagataataggaataaaggaggaaaatatgcaattatatacaaagaccggtgataaaggtcttacaaaattagtaggtggtcaaagtgttgcaaaggattcggatcgagtcaatgcatacgggactattgatgaactaaatacttgggttggttatacgattagtaaaatggatcctgaagatgaattgagagacgaattgtatcagttacaaaattatttgtttgattgcggttcagatttatctactccacatggtgtttacccatataaagtggatgaaagcctcatcaaatggattgaagaacgaattgatacgtatgcggatattccaccagctctggaaagattcattttacctggcggtgatgaaattgcttcaatggttcatgtagcaagaaccattgcgcgtcgtgcagaacgacatattgtcgcgaccatgtggacaaatgaaattaataatcaagtcttaatttttgtgaatcgtttatctgactatttctttgctcttgccagagtgattaattatcgaaaacactgtgaggatattccttatgaaagaggagcaaaagtgtttcacaatattacaaaagcagatgtggagcggtgggcaaagaaaaataataactagaataaaagcactacctctaataaaaaaataggggcagtgcttttttatctatgtcataattttttgattaaaggtgataagaaaaaaaaccttgtctttcctaaagggaaggacaaggttagaattcgaaagccagatgtacaacagtgtacaaatttcgtgctaagcttcattggttaacagtagctttccaaatattgactctgcttctttgcagatgatgggaaccccatccttagaaaatgatacgtactcatacgtagagtcaataggggaaagcactattttggtgtatttcctaactgacatcaccaccttacatcgaggcgtgaaatctactaaaatttaagaataaagacctgacttaaagctaagcttatcacagtggcgggaccgtgttggattttcaccaaacttccatactcttaaaagtaccaaaatcatttctagtaactttatgatagcacgatctagaagaatctgcaagtattatgatcaaaaaaataaaatatatgttttttcttttgcgttgtaagcgtttttatgatatactttttgtaaagtacaaggacgtacaattttaagcaatgaagctatatgaaatatgccaaaatttatactatttggtagtgtttcatgtggcttctttttatgttgttttaagagtttcaaatgataaagggggtaaaataaaataagaaactctgaaaagaaaggagaaagaatgtataatatttactacaaaactaaaatttttgtcggcaaaggtgctttggcccaattagaaaactatcataacaaaaccatattggttgttgctgatccgtttttaaaagaatctggacagttagataaaattcttgattatttagacgctagtaacgatatcataacctttactgatattgttccagatccgcctattgatgttattgtggcagggattcacgcgactgaagggaaatcaatcgatattgtcttatctgtcggtgggggatctgcaattgatgcatctaaagcaatgtattactttgcgaagaaacaagggatttttactgatgtggaattgatctctatcccaactactagtggaacaggatctgaagtgacaagtttcgcagttattactgatgctgagaaaggacaaaagtatccgatcgtagattgggatattctaccggatatcgctatattagattccaatttggtggaaacactaccagctaatattacagcagatactggtatggatgtattaacacatgcgattgaggcctatgtttcaaataaagcaactgatttttctgatgctttggctgaaaaagctatcaaattagtatttgaatacttgcctcgtgcatacaaaaatggacatgatttagaagcacgtgaaaaaatgcatgtagcctctactttggcgggaatggccttcaactcagcttcattggggattaatcatagtatcgcccatgcagctggagctaaattccatattcctcatggacgacttaatagcatcttaatgccacatattatccagtataatgcgaatgtggcaacgacaggtacccgtgctggtaatttgaataaagaaactgctgaaagatatcaacagattgctcgtttattagggttgagtgcttctacacctattctaggtgtaagacaattagtggatgctgttcgaaaacttcagaagaaattagatcatccgacttctttaagatcttatggagtgggagtggatgattttaatgctcataaacgtgagattgcggaagctgctttattggataagtgtacgattacaaatccgagagtccctacagttgaagaattattgaaggttttagaacaagctttctaaaaagagtcattttaaattaacaaaaatagagtataaagtctaattcatttagtagaaatgaatctgctggtgaaaattaaaaaagacatgtgagttcagatttttttatgaatatatatatataataaaagttcacatgattaattggaatttttaaatttattttgtttaatataggcttacttttataattttttaaaagcactaataagttgtcttgtattggttttgcatagtacataattagatgttagtggttctatattttataatcaattatttcaaatagttaaattaacatacaaaaaattaaaggattaaaaaaatttccctcaaatttaggatctttaatttgacactgttatgtaataatttaattaataaattttattgaaagcgaatactaaatatagtataatcaaattatttagaattatatttattgtaaaaccaatccagaggtggtaataaatgtcagaaaaacaaagaatgattcaggaatacgttcctggtaaacaagtcacattagcacatttaattgctagtcctgatcctgttatttttgaaaaattggggttacagacagattttcgtgatgctattgggatattgaccatcactccaagtgaggctgcaattattgctgtggatatagctactaaagcagctggggtacagattggttttgtggatcgatttagcggatctgttgtaatgacaggggatgttgcgtcagtagatgcatcactccacgcagtattaaatggtttagaagagattctaggcttttcaagtacagttgtaacaagaacataatttcatatgagggatggagtttatgaaaggcagaatactaatttgtgatgatgatccgattattcgcttagatatcaaacaaattttagaacagtcagattatgaagtggctgcagaagcaagtgatggttttgaagctattgaactttgtcaaaaacactttttcgatctagtaataatggatattaaattaccgttattagatggtttgtcagcaggtaaaaaaatattagatgatgaattagcatacggtgtgataattctttctgcttataatgatgaccattatatcaaaaaagcaagtttaactggtgctagtgcttacttggtaaaaccgttggatgcaaagtctttaattcctacaatagcagtttgtatagagaaaggacggcaacagcaattactttcgaaggaattaattaaaattagtaagaagctcgatgatcgaattgttttagaaaaggctaaaggacttttgatgacgagagataatcttacggaaccagaggcttttaaacagattcggacaatcagtatgcaaaagcgtgttccaatgattgaaattgcaaagttgctgttattgaataatgaagtacaataatcagataaagaaattttgcgaggataaaacagatcttaatgaagcagatattgattatttgattcgacaatcagaggcagttttatcaagcaaagagtttatggataaggacgtcttcattgatgtaaaaaatattttttctgatcatgcaattgtcgtttttcatagaaagcctcatacaaaggagagcttgtatgaaaaaacagttgttgggcagtctgcctttttagaaaatgaacctggggttcttcgtacacttcaaacaggtgttccttctgtgggtcttcgaggacaatcgcaagaaggagttgcaattgaacagactgtttttccaattatcagaggaaaaaaagtaattgctactttaatcgttgaaagtgatttttcagatagtttctcatcaagtttttctctccagcattcgaaaggtgaccattcttatatttttcaagcaccttctgaatcaatccgggaagaagaggtatcattattagattatgtagaagatgcagtattagtatttgatcgaggaggatttttactacattgcaatcaatcagcggttgtcttatatcgaagtaagttgggttacttagaaagtatacaaggaatgcattatgataatctctctttagatggaacaattttttctgaattagtagaggataatttttcaaatagtaataaaacagttaagtacggaaaacattattttcaagtgaagtgttatcccaatgctcgcaatcatcaaacgattattactataaaagataccagtgaactacgggaaaaagacaaagaaatccaagagagtttgattgcttctcgagaaattaatcaccgagttaaaaatcatcttcaaaccattatttctttattgcgattgcaaggagcacaggttaaagagtttggtacaaaagttgcttttgaagactgtataaacagaattttctcgatagctgctacctatgaacttctttctaatcaagaaaatgaaaaaatagatttgaagtctttggttgaaattgtttcatcaaatcttcaacgctgttttgcagaaaaatcagaaattcaattaaaattaaaattatgtgatgatatttacttggatcataatagagcatcgtcactggcattggtaataaatgaattattacaaaatgcttatgagcatgctttttccaataaaaaatatcaaaaaaataaaaaaaatcaatgtattcgtttgcaaatgacgaaaaatgatgatataatacgtatacaagtaattgataatggtagcggttacaatgtcgaaaccgtgggtcaagagcatcttggcttaatacttgttcaaagatttgtagagagtaaattatccggaagactagacacgacctcaaacaatgagggaacgcaagttaagataatttttaaagtgtaaataattctagactaacaatgaagtcagtcgaaaagcaatgacgcttaaaggatgcaagaaaccgatgtttcagtgcattctttaagcgtctttttttggaggtttcctatgtcggataaaattttgagtgttgggttagatcttggaactgcaactactcaattggtcctatctgaacttacgattgaaaatattgcttctgtatttacaatcccaagagtatatataacggataaaaaagtcctttataaaagtaaaattatttttacaccaatttcacatcagtctttgatagaagttgataagataaaagattttgttatccaagaatatcaaaaagctgggattgaaaagcaagatattcagatgggggcagtaattattaccggtgaaacagctagaaaagaaaatgccagccaagttttgcaggcgttgagcggttacgctggggactttgtagttgctactgcggggccagatctagagagtattatcgcaggcaagggagcgtgtgcacaccaatattctcaagaacaccatacttccgttgtaaatattgatattggaggtggaacttcaaacttcgctgcatttcgcgaaggagatgtaattgatacaggttgttttgatattggcggtcgtttgatcaagattgatcctaatacacttaaaatacattatatttcaccgaaactacaagaaattataaaacaagaaaatttaagactgtttttggatgaaattgtaaatagggatgaattgaataaattaatccaaattttagtgagagttttagaaaaggcagttgggcttgaagtggatgctccatattacgagtttttacaaaccaaccatggattgcgactcgattatgaattgaaatgtgtttcattttccggaggagtagccgatgctatttatcaagattctgctactaatgattttgcctacggtgatattggtatcatattgggacgtgctattcgtcaatcaaagatttttgaacaaaagagagtgattgaatcagccgaaacaattcgagcaacagtcgtaggtgctggaagtcatacaacagaggtaagcggaagcaccatcacttatatttctaaaactttaccgattagaaatatacctgttttgaaattagcgaaggacgacgagctagagagttgtgaaaaattaacagaaataattcatgataaattagaatggtttaccttagaaaatgaagttcaacaggttgctttagcaattaatggtgaaaaaagtccaagttttgttagagtacaagaatatgcaagcgctatcataaaaggaatgggagaaagtattcgaaagaacattccattacttgtagttgttagagaagatatggctaaggttttagggcaatgtttgtttgctgaattaccaaaagattatccgtttgtatgtattgactcagttgatgtccaaaatggtgactacatcgatataggtaatccagtgatagagggatcggtcttgccggtcgttgttaaaacgttagtttttaattaagaaattattaaaggaggagactttaaatgattttaaagacaaaattatttggaagagtctatgaattcaaatcagtaaaagaagttctagctaaagccaatgaatacaagtcgggtgaccaacttgctggggtggcggctgaatcttctgaagaacgtgtagcagctaaggtggttttatcacaattaaaactatcagatttgtttaacaatcctgttgttccatacgaagaggacgaagtaactcgcattattattgatgatgtaaaccttcgaacttatgaaaagattaaaaattggactgtttctgaacttcgtgagtggattttagataacaaccaccaaaatgttgatattcaatggctttctcgtggattgacctcagaaatggttgcagcggttgctaagttgatgacaaacttagacttgattgttgcagcaaataagattgtcattacaaaacgcgctaatacaaccattggtatgccgggaacattctcttctcgtttgcaaccaaaccacactacagatgatcctgatggaattatggcctctacaatggaaggttttgcttatggatgtggggatgctctgttagggttgaacccagttgatgattctgtagagagtacaaaacgaattcttcataagtttaatgattttatcgaagagtataagattccaacacaacactgtgtgctagctcacgttacaactcagattgaagcaatgaaccaaggagctccaactggattggtattccagtctatcgcaggttctgaaaaagggaatgcggcattcggttttgatgcaaaagttcttcaggaagctaaagatacagctcataaagttggtactgcagctggtccgaacgtgatgtactttgaaactggtcaaggttctgagttgtcatcagatgctcaccatggtgctgaccaggtaacgatggaagcacgttgttatggttttgcgaaacgttttgatccattcttggttaacacagtagttggattcatcggtccggaatatttgtatgattcaaaacaagttattcgtgctggtttggaagatcacttcatgggcaaactgaccggtatttccatgggttgtgacatttgttacacgaaccacatgaaagccgatcaaaatgacgctgaaaatctattggttcttcttggagcagctaatgttaactacatcatggcaattcctcatggtgatgatatcatgttgaactatcaaactactggttatcatgaaactgctacgatgcgtgatctattgaacaaacgtccaatcaaagaatttgaagagtggatggaaaaaatgggattgatgaaggatggacatcttactgaaatcggtggagacggatctatctttatgaaacaaaattagtaaggaggtattgacagtgaatgaacaagatttaaaagaaatgattcgttctttgttaagcgaaatggatacggatactgttacagagctaaaaaaggaagagcaaacacaaaactctgaatttaagtctcttgaaaagaatggtgttcaacctgataaagaagaaacgactattgaagatggaattattccagatataacagaagtggatattcaggaacagtttttagttccaaatgcaattaacgaagaagcttatcgtaaaattaaaaaattcacaccagctcgtttgggattgtggagagcaggaaaccgttataagactgagacagttcttcgtttccgtgcagaccatgctgcagctcaagatgcggtgttctcatatgtttcagatgattttgttaaagaaatgggattcattcctgttcaaacaaaagcatcaacgaaagatgaatacttaactcgtccggactatggtcgtgtattcccagaagatcaacagaaaatcattaaagaatcttgtaaaccaaatccaaaagtacaaatcgttgttggtgatggtttgagttcatcagcgattgaagcaaacgtaagagatttcttaccagccttaaaacaaggtttgaaaatgtttggtctggattttaatgaagttcttttcatcaaacatgctcgggtagctgcaatggaccaaatcgctgagcttacaggagctgaagttatctgtatgctagttggagaacgtcctggtttggttacagctgaatcgatgagtgcatatatggcttataaaccaacagttgggatgccagaatcacgtcgtacagtagtatcaaacattcataaaggtggaactcctgcagttgaagctggagcctacgtggctgaaattattaagaagattcttgataataagaagtcaggggtagaattaaaatagaaatggggtttagattttgaaaaatgatagacttggcgctaacgtattaagtgcattattaattcctaatgtagatgcagggttagcagcatcattggaactgaaaccacatcatagaagtttgggaattgttacctctgactgtgatgatgtaacctatgttgctttggatgaagcgacaaaagcagctgatgttgaagttgtttatgctcgtagtatgtatgctggagctgggaatgcttctactaagttagctggtgaagttatcggtattttggcgggtccaaatccggaagaagttcgtagtggcttagatgttgtagtttatgaaattgaaaacggggctagtttctatagtgcaaatgatgacgacagcatcccatattttgctcattgcatttcaagagcaggtagttatctttcggaaggtgcaaacgcagaagaaggaacagccattgcttatttaattgctcctcctgcagaagctatggtagctctggatgcagctttaaaagctgctgatgtatcggttggtgcattttatggaccaccaagtgaaacaaactttgcaggtggattattgattggctctcaatctgcatgtcgtgcagcatgtgatgcatttgcccaaactgttcaaagtattgcagataatccaaagagttattaagatgaggtgtgcttatggcagaaaaagcacttggattaattgaagtacgaggttttcttggggcggtcgtagttgccgatgctgcactgaaagctgccaacgtctcactattgaatgtagaaactgttaagtcagggttaaatacggttcaattggttggagatgttagtgcagttagatcagcagtggaagctgcagttgagattgcacaagatcaaccatactatcttcatagtcacgtgattgcacgattagactcgcaaactgattcgatcctccttccaattcaaaaggaagtgaataaagatgtgtccaaagctgaaacttcttcatctttagaagagagtgttttagaagtgattgatttgatggatgtacccgaagttaatccaaaacctttaatatcagataatgaaacagcttttgttgaagatgtcatttctgaaattatagttgatgaagaggttctaacagaaggacagcagaaatattctgaggaagaattaaataaattcaaagttgttgaattaagaagtattgcttatcgggaagataaaatcgatctatctaagaaagaaattaaatttgcgaacaaacaattactaattcaagctttactgaaattgaaatcataggagaaagttgaatgtatattgaagataaagatcttttatctatacaagaagttcgccatttgattcaacgagctaaagttgcacaacaaaaactagcattgatgagtcaggaacaaatcgatacgattgtaaaagttgtagctaaagcttgttatgatcaaagagaacgtttagccaaaatggccgcagaagaaactggatttggtaagtggcaagataaagttttaaaaaatgcccttgcctcaaaaggtattcttgaagaaatcaaggatatgcgtacagttggtattttgaacgaagataaagaaaacaaagttattgaagttggtgttccagttggtgtggttgccggattaatcccttcaaccaatccaacttcaacagtcatgtataaagcgcttatcgctttaaaaggtggaaacagtattgttttctctccacacccacatgctgcaaaatgtatcaatgaaactgttgatattattaaaaaagctgcagtttcagcaggttgtcccgaaggtgcaatcggagttattcaacgagtttctattgaagcaaccaatgaattgatgaaacacaaagatacaaacttgatcttggcaactggtgggaatgcaatggtaaaagctgcgtattcatcaggaacacctgctattggggtaggtcctggtaatggtccagcctttatcgaaaaaactgccgatattcctaaagcagttcgtcaaatcctagattcaaaaacgtttgataatggtgtgatctgtgcttctgaacaatcaatcattgtcgaagaagaaacaaaagataaggttgttgaagagttcaaacgtcaaggtgcttacttcgttcctaaagaagatgctaagaaacttggttccttcattattctacctagtggagcaatgaatccaaaaatggtaggtaaaacacctcaagtgatcgctaaactggcaggaatttctgttccagatgatgctcgtgttttgatcgctgacggtgaaggagtcggaaaacaatatccatattctatggaaaaacttgctcctgttcttggtttctatactgttaaaaattgggaagaagcatgtgagttgagtattcgaattcttcatcatgaaggagctggacacacattagctatccacacccaagatgaaagtatcgttcgagaatttgccttaagaaaacctgtttcaagacttttggtcaatactcctgctgctttaggaggagttggtgctacaacaggtttgttcccagcctttactttaggttgtggagctgtaggtggaagcgcaacatctgataatgtcagcccattgaatttgattaatattcgccgtgtcgcttatggtactgcagaattgtcagatttaagaaaggctgaaaatcaagaaaatcttgactgtcaacgctgtgaagttgataagcaagtagatgaagaacaattagttgatctgcttgttcaacgtgtgttatcaaaattaactaaataacttattcatttcataattggaggaaattaaaatggcaaacgcaaacgcattaggaatggttgaaacaaaaggtttagtaggtgctatcgaagcagcagatgctatggtaaaagcagcaaacgttacattgattggtaaacaacaagtcggtgctggattggtaactgtaatggttcgtggtgacgtaggtgcggttaaagcagcaacagacgcaggagcagcagctgctgaaattgtgggtgaattaatttcagttcacgtaatcccacgtccacactctgaagtagaagttattctaccacatccatcagctgaataattaggtttaataataggaggaaaagattatgtcaaacgcaaacgcattaggaatggttgaaacaaaaggtttagtaggtgctatcgaagcagcagatgctatggtaaaagcagcaaatgttacattgattggtaaacaacaagttggtgctggattggtaactgtaatggttcgtggtgatgtaggtgcagttaaagctgcaacagatgcaggagcagcagctgctgaaaatgtaggtgaattaatttcagtacatgtcatcccacgtccacattctgaagtagaagttatcctacctcataaagagtagatttttataatttctcaatcaggtaatcagcaattaatgttttgataggaataagcattttgatgtaaagaatattcattcatgttaatagctgtacgaggttgggaagttgaatctcaacctcgttgtatccctgtggttaatttgtggtagaaggatgtgaatgcatgacagtttatactgaatcacgaattagaaagctaataaaagatggcaagatcagtgagcaaaatatcttaaaactttcgaatgatgataaattgactccagctgcaaaaggttttttgcatgatcgccatattcagatagtttattctgatttgccaaataaaactcaaacagagattagtaaaccatttcatatgactgtttcgtctctagaagagtctgctgtgtatccactacttttcaagctaacgaaactatatacgtattttctaaaatgtcaaaaggaacttcatctttcatatttagatgagaaagttgatcaattagggattttacttcaaatagtagaaaaacttgtcggctgttatatcgaagaggatatctcattttataatccaaattttgggacaaatgaagatttacagtccattcgagtcattaaacagttggatcaaggtagtataagagttgattttaaatgtgaaagctggaaactttcttgttatgaattatatcttgaaattgtaaatatccgtaaggaattactgctagtatcatcggataatcaggatatctatgcagagaaactgatagcattattgaaatcaattgaagttttagtgtggcttattttagaatagaatgtggagaataacaatgtcatttgaaaatttaattgataaagttattgataggattcaaaatgaattagatggctcatttgaagtggaagctagtgggagacatgtgcatttaagtcgtaaagaattagatgcgctgtttgggactggatatgaattgacgaaggctaaagatttatctcagcctggacaatatgcttcaaaagaacggttgactgtagtaggtccaaaaggagcttttcataatgtcgttattttgggacctgttagaaaagagtctcaagtagaggtatcacttacagactgcttacaactaggagtcaaagcacctattcgtgaaagtggtgatattgaaggtactccaggtattgtattagtgaatggtgataagtcagtttccttggataaaggtttaattgtagcaaaacgccatgttcatatgacgcctgaagatgcagaaaaaatgggtgtgaaaaatcatgatattgttaaagtgaaggttgaaggtgcaagaccattaatctttgacgatgttgtaattcgtgtcagccctaaatttgcaacttatatgcatatcgattacgatgaagccaatgcttgtggttttagcaaaggaatccgtggtcggattattaaagactagtattggttgttggaggtaggtcaaaaatggagaatctagataagatcgtagatttgattacagaccgtttaatggataaaatacaggttgaaacgcataaggcctcagtatttgttatcggagcatttgatattcctgaaatcgtaacgaaagaaggttatcaagttgtgaaacaatcaagtagtgctgacatcattctagtagaatcaattggttttgatgcaatgatgcgaatcgcttctttgtgtccgctaaatgctgatgaagctgttgtcattaaaagtttgttgaaaggaaagaaagttttggttccagtagaatcatttgacttccatcagtttaaacaaacttcaaaagccttattgtttcaagatcttcaagaacagtacgaaaaacttcttcgatatggtgttcaattctataaaaaagaagaattgctatcattgctagaagaatctacttgtggagaaaacaataaacctttaaatgatgtgacaaagaatgaaacacaaccgaaatctgttgaaaaggttggcttattaactgaaaaaaagttaattgaaatgaacctatctgatcatgataggattcggattaaaaaaggaatgattgtgaccgctcttgcgaaagactatttgaaacgtcacaatattataatagaagaataaggagtagcgagatgtttgttgggaaagtgaaaggaagtctatgggctacgagaaaagatgaaaaacttaatggattaaagtttttagtggtcgaacgacaactggatgaccatcaaacagatcctgccttagtcattgctgcagactgtattggtgctggtgaaggtgaccaagtattggttactacaggaagttcagctcgagtgagcttgaatagacaggatattccagtagatatggttattgttgggatcatagataaagttgaatatcaactggatgattattgaaagtagggaagaatttatgagtataaatgaaattatcatttacattatggttctctttatgcttgttggtgcaattgatagatgtatcggcgggaaattgggcctgagtaagcagtttgaagaggggattatggctatgggagcgctggcgctttctatggcagggattatggttgtagctcctttgttagctgatttgttaaaacctattattgtacctctttatggtttggttggtgcggatccttcgatttttgcaacaacatttatcgcgaatgatatgggcggagcacctttagccttaagcttggcacaagataaagctgttggtgattttgctgcctacgttttaggttctatgatgggaccaacgatcgtattcacgatccctgttgccttaggaattatcgaaaaatcagatcgtccttacttggctcgtggtattttgtacggtttggtaaccgtgcctgttggatgtttagttggtggattacttgttccaggtttgtcttttggtactttattaatcaacttgatccctattgtcatcgtttctgcccttattttcctaggtttgcttcttattccaaatggaatgattaaaggatttgagatctttggtcaaatcattgttgtgatcgcaactttaggtttggcattcggtgcagcacaactcttgactggtaataaatggttgcttgaactttatccaaaaggtgcagaaacccttcaagaagcatttgtcgttgttggttcaatcgcagtaaccttggctggtgcttttggtttagttgctgtctttactaaagtagccaacaaacctctttcagcaattggtaaatcattgggaatgaacgaagttggagctgctggtttggttgcttctttggcaaacaacattgccatgttccaaatgttaaaagatatggataaccgtggtaaaatcttgaatattgcctttgctgtatctgcttcattcgttatcggggaccacttaggatttactgctggacaatctcctaagatgattgttccaatgatgattggtaagtttgttggtggggttactgccgtattacttgcctacttcttgactaagaaagaagcctaattggaggtattggtaaatggattataatcgtacagatattgaatctttagttcgcaaaattcttctagaagaattggcaggtaaaggttctgctaaacgtgttagtaaagctggtgtagcctctatttcactaccaagcttagatgttcgtcctgaagatcgtttggacacaggaaatcctgaacatcaagtctatacacgtgatcttttgactcttgaagaaagtcctcgacttggcttaggtttgatgacaatggataagacaacattcccttggcatttagactatgatgaagttgactatgtgatcgaaggtcgtttggatgttatctctggtgatgaagtgatgagtgctggtccaggtgaaatcatctttattccaaagggaagcgatattcaattctctgttaaagataaagcacgctttatttatgtgacttatccagcagattggcaaggataatgaaattttatatacaatagtttataaggagcaccataagtgtgctctttttgattgcgttttcaatttttcattgacaaatgctataatttatattagaataaagacatctttggtgtttaagaatgaagagagcacaacgaggtgcttagtaatttaataaagcaacggagctacaaaaaatagtgtattttttgtagctctatttttttcaagagatgggggtttttaggatgaaacagtttatgttagctggtgtatctagtggtgttggaaaaactaccgtaacactggctgtattaagagctttaacagatatggggtacaatgttcagccgtataaaattggtcctgattatattgatacttcttaccatagtcgtattacgaagaactcatctcgtaatctagataattttttaattcctgatacggattatctgaagtggtcttattatcgttggcatcaaaattctgatgtcgcagtggtagaaggggtgatgggactctatgatggattaggaacagataaagattgtgcctcttctgcatctgttgctaaacagctcaatctacctgttgttttaattattgatgggaaatcaacctcgacttcagcggcagcaattgtccatggcttttcttcatttgatccagcggtagatattgttggtgtcattgtcaatcgagtggcttcggaaacccattatcagctgattaagggagcgattgagcgctacactgatatagaagtcctggggtatttcccaaaaaatgttcaggttgaattgccttctagacatttgggattgattccggatgtggagatggatgatcttgaagaaaagtttgctattcttggagagcaggctaaaaaaaccattcagtttgagcgcctattggagaaagttgatagagaatcagttgaactttcttctccattcaagcttgagaattctaccccattaaccattgcttatgcactggatgatgcctttcatttttattacgaagataatctggatttattaagaagtgctaatgtcgagctcattccatttagtcccttaaaagatgaacgcttaccggaagctaatgcctattattttggtgggggctatccggagttgtttgcaaaagaattgtctgacaatcgttcctttagagaatccgttctagaagctcatcaaaagggaatccccatctatgctgaatgcggaggattgatgtatcttggaaaaaatcttgagattgaagatcagttctttgaaatggttggggtatttgatggtactagtgtgatgaccaacggactaaaacgttttggttactgttttgcaaccactaatgaagattctttatttggtccgtctggtacggaagttcgaggccatgagttccatcattccatcttcaatacttctgaaaaaacagttttagacctcagaaaagaaagagatggagaagtggtttccaattggacagggggctaccagaaagggagaacttttgcaagttatcttcatgttcatttttatcaaaaggaacaactccttatgagttggattgattatatcttggagtcaaaataatgataattattgcaatttttatcgctcttcttcttgattggttaattggagatccctattcgtggccacacccggtcaaactaattggaaatttcatttatgcttgtttacggatggaaaacttaaaaacgagatatccttttctgttcggaatattcctttggatatgcaccgtttctttgacagtttccatcacgtatggaatcttgtggggtgctagtcagcttcacccgattctttattggattttgtggatttatttagcctacacctgtttagcaactcgctctcttgcctttgaagctctcaaagtatacaaagccattcagtctggttccattgagaaggctaggtatcaagtgggaatgatcgttgggagagaaacagatcagcttaccatacctgaaatttgtaatgcgaccattgaaaccgtcgcagaaaatgcaagtgatggagtgatcggccccttattatgcttatttattggcggtcccgtattagcaatgggatacaaagccattaatacactagattcaatggtcggttataaaacagccaaataccgtaagattggatatgtttcggctaaaatagatgatttggtcaatctcattcctgcccgtttaacttggttgtttatgatggcaagtgccagagtcctgcaattggatttcgaaaatgccttaaaaataggttggagagatcgctatcaacacgcgagtccaaatagtgcttttcctgagtcggtcgtggcaggtgccctggggattcaattaggtggagctcatatctatcatggtgagttgattacaaaaccaactattggtgatccttcaagaagtgtagagccagatgatattttaacatccatttctatgctctatatgacaacgacgatttcagttttcgttttgtcgatcatttatttcattgttgcaatttattaaaagaggagtatgtatgtcctatatcaaaaatccttcctcaattgaggaaaaaagtttccagatcattcaatctgtgatcgatcaggatcatccaggttatgaattccatgaagatatggaagaagccattattaaacgtgcgattcataccactggtgattttgactatctctataccatgaaatttatcaaccatgttaatgaacgtattgttgatgtaattcagaataaagggaccatcattgttgattcaagtatttctttaaatgggatcaataaacgagtgttggaccaaatgggtgtttcctaccgttgcttgattaatgatgaagatgtcatccaacttgctaaggaaaaaaatatcactcgagctatggctgctgttgaaaaagcaacagagatcgaagggcctaaagtatttgcttttggtggagcacctaccgctttgttccatctccttgatttgatcaaagataaaaaagtagaggtagatgcgattatcggtgtacccgttggatttatcaatgtcttagagtcaaaggaagctttattagcgaccgacttgcctgttatggtaaatgaaggacgtaaaggcggaagcacccttgtcgtagccattattaatgcgattatctatcaaatgcaaacgatcgtgacagaagactatgttcgttattcaacagctttaaatgataaaaaaggataaggtattcatgagttatataaaagtatcaaatcagattgaagaagccagctttaaaaagattcaagaaatcattgatcaagaacatccagatattgtttttgataatccctttcatgaagcagtttggaaacgagtcgtttttgcgagtgcagatttcgattacctctacaatatcaaattttcaaatgatgccattgaccatattttggatgttattaaaaataagggaaccatttttacggatacgaccatggttctaggtggctttaataaaagaatcttggatgaacttggtgtggcctacagatgtttggtaaatgaaccagcaatctttgaagaagctaaggcaaaagggattactcgctccatggcagcggtcgaacatgcggccaatgaattgggtcctaaattgtttgtattcggaaacgctccaacttctatctttaaagtcttggatatggtagaagaaggaacactagtccctgatgctgttattggtgttccggttggctttgtcggggcggcagaatcaaaacagaagcttcatgagagcccaattccttctattgttgcattgggaagtaagggaggaagtactattgcagcagcagtggtcaatgccattctgtaccagtacaaacaagaaatggatgattaccaacgcttcgtagtcccaaataattaagtagtgaaggaaatggaactatatggatgattacgcatatgtcaatggaaaaaaactaagaaaagggttcactactggaacttgtgcgacagctgctacagccgcagcgattagcatgattttgaatcaagatatcgaagaaaaagttacagtttctacggcgaatggtgtcgaagtaacgatggatatcaaagatccttcttttggtgaactgactgctagtgccgctgtcgaaaaggatggtggtgatgatgcagatgcgacgcacggactcctgatttattcgacagtgactctcataccagattcaaacgacattgagatcgatggaggagaaggtgttggtcgcgtcacacaaaaagggctgaaatgcgatgttggaatggccgcaatcaacccaactcctcgggctatgattgaaaaaacagcccgacaattactggggccaaactgcggagcgaagattattatttcagtaccgggtggggaagaaacagccaagttgacctataattcacgcttaggaattgtaggtgggatctccattttggggacgacaggaattgtcaatcctatgtcagaagagagttggaaagcttctattacgattgaattaaccatgttatacaatcaagggtatcgttcagtagttttagctcctggtaattatggcgaagactttgcaaccaatgtactggggattccacctcatcggattgtgaatatgagtaactttgtcggtcatgtcctaaaagaagttcagcggatcggatttactcgtgttctgatggttgggcatatgggtaaatttgtcaaggtggctggtgggatcttctcaacccatagtaaagactcagatgcacgaatggaaatcattatggccaatctagccttactgggtgctccagttgaactgcttgagaaagtggatcagtgtattacaacagatgcagctggtactttgattgaggagtatcactacgaagaagtttatcaagtgttagtagacaagatgaaattccgttcggaacgtttgctgcgaaatcggaagccggaagtcagcatcgatgtagtgacctttggtacagaagctgggtatctagcatcaacacaaacattggaagaaatagcggaggaatggacgtgatctatgtaattggaatagggcctggagccccttcctatggacttttgggaagcgaagagatatatgaaaagtcagactatattcttggaagcgagcgacatttagaaatccttccagctgcctatcaagaaaaaggagttgtacctccaaagaaacttgctgagttggctcaattaatagagtcttatccagaagagtcaactattctttatctggcttcaggtgatcccttggtttatggtttaggaaaatggttatctgaaaaatttaaggggcgcgtggttattcagccaggaatttcgtcttttcagtatttggcaagcaaggtttctttgccaatgaatgaggcctacttgacgagtagtcatgcgaagattcctgattttgatttcttgctttctctacccaaggtatttatggtgacggataagaaaattggtccctatgaaattgctcaagaaattataaaacggggcttgaaaaaagtcttagtcataggtgaaaatcttagctatgaagatgaaaaaattgaaattttagcagaagatcaagttatcgatcgacaatatgaaatgaatgtggtggtgatactaaatgaaggattcggcatttattagagcaaaggtcccaatgactaaagaagaagtcagggctatcagtattgataaattggacttacacaaggcaaagagaatgttggatgttggctctggtacgggtagtgtaaccattcaagcagctgtatcttttccgaatttagaagtcgttgcaattgagcaaaatgaagacgcagttgcactgacacaggaaaatattgattactttggatgtcagaatattactctaataaaaggtaaagctcctgttgagctagaaggacaatttgatgctatatttgtcggtggaaccggtggcaacatggctgaaatatttgagtggtgtgaacatctgttagttccgggaggacgctttgttttaaacttcatccttttggaaaatgcgatggaagcgattcaacttgctgaagagatggaatggcaagacttagacgtcgtatccatccaagcgagcagatggtctgccctaggaaaagggcattatttcaaacaacaaaacccaactattattgtttcagctgtaaaaccagaaaggaaataaaggtatgtcaattgtacattttgtaggcgctggacccggtgatgtggaactcattaccctaaaaggttatcgaaaattatcccaagcggacgtggtcatttatgcgggttcacttgtgaatcctgatcttcttcaatattgtaaggaaggtgccgagattcatgatagtgcgtctatgcatttgatggaaattatcgatgtcatggaagaagcggtgaaggctggaaaagatgtcgttcgcttacaaacaggggatttctctatctatggttccattcgtgagcaaacagaagagatgaagaagagaggaattgaatttgactgtattcctggagtgagctctttcctaggagctgcctcaagtatcggaacagaatatacagtccctgaagtttctcagagtgtaattatcactcgtatggctggacggacccctgttcctgatcgggaatcactccgaagttatgctcaacacagaacctcaatggccattttcttatctgtacagggtattgaaaaagtggtggctgaattggtcgagggtggctatcccaaagaaactcctgtcgctgtgatttataaggcaacttggccagatgagcgcaaggtctttgggacattggagaccattgctgagaaggtcaaagaagctaaaattagaaaaactgccttgattttagttggagatttcttgggtgaagagttttactactctaagctctatcacaaagattttcaccatgaattccgtaaaggattgagttcgcatgctaaatgattcccctcgttacgccattgtggcggttaccaacaatgcaaaaaatctaggactagagctcaaggaaaaacttgggattgattgtccggtctataccactgtgaaaatcgctgactcacgaacggtaccgattgaaggtcgtgtcattgaagggcttcggacggtatttcaagaggtggatgtcttaatttgtatcatggcgataggtgcggttgttagaggcattgccccagttattaaagataaaacaactgatcctgctgtgatcgttatggatgaaaaagccaatcatgtgattagtttgttgagcggtcacttaggtggggccaatcaggttacacttaaaattgctgaattattggattcaaatccagtaatcacgaccgcaacagatacacaaaatgttgtagcgctagataatattgctaaagaagtaaatgggtggcgggaagaattgcgccccttagtgaaagtatttaattcttatctagcgaataaggactgtgtctatttttatcaagaaaagccttgggtatctgacctgagagggctaacagtaattgaagaaaatcagattcaggaagtccttgctactaagagcccatttatttggttgacctctcaagcagttgaggttgacgaagaagtggtagccctgattcatccaaaaccctatgttttaggagttggagcaaagaaggatcttccaccttcaacgtttatggaatcttttcgtgccttttgtgagcaagagggaatctctggttcagaaattgcaaaaattgctagtattgatgtcaaaaaaaatgaacaggctatactagaattggcccaacaccttgactgtcctttccacacctacactaaggaggaactgctagtggtggcggataaatatccgcaatcagaatttgtcaagaaaactgttggggttggaagtgtggcgcttgctagcgctgatcttgcaagtaaaggaaatgtgctgacccaacggttcgcacaaaatggtgcaacatttgcacttggtaaattagttaacaattattaattattaaatttaaggagaaatacatatgttatacgttattggacttggcccaggtaaagaagaattgatgtctcaagaggcattggaagcaatcaaggattgtgaaattattgtagggtattctacctacatgcgcttgattaaagatttagtaaaagacaaagaaatggttgcgactgggatgcgtcatgaaattgaacgctgtcaaaaagccattgatctagctcacgaaactggaaaaaatgttggggttgtttctagtggtgatgccggtgtttatggaatggctggtttgatccttgagttattagaagagaacgatcctcttgaagtgaaagtggtaccaggaattacagcaagcctaggagcagctgcagttatgggagcacctctcatgaatgacttctgtcatatttcacttagtgacttgatgactccatgggaaatgattgaaaaacgtcttcatgcagcagcacaaggtgattttgtcgtatgtctctacaacccaagaagtaaaggtcgtccagagcacttagcaagagcacttgaaattatgtctcaatacaaatcgaaagacacgattgtcggaattgggaaggatatcggacgtaaggaagaagaaattattcttactacgattgaagacttggatgaaactcttgtagatatgacaacgattgtaattgttggaaacaaagaaacttatgtgaaaaatggacgcatgattacacctcgaggatatacactatgatgaaactactttttggtggaacagctgaaagtacagagattcttgaattcctctcgcaacagaatattccggtgactacctctgttgtatcagattatggccgccatttagcttcaaaatttgggcaggacgtggtccaagggagaatgacggctgaccaaatggtggctttcatcaaagagaatgacgtagatgaaattattgatgcttcccatccctttgcggatattgtctctcaagaagcgatgaaagcagccaatcaggcgggaattccctatgtgcgcttcgaaagacaagctaccctcgacttatctggtgctaccgttgtccattcaacagaagaagccattgaatacatcaaagagaaacagtataaaacagtctacttaggaactggaagcaaaactttgccattatttgtccatggtttaccagagtcacgtattgtggttcgtgttcttccgacttcagaagttttaaaaggttgtgaagagttgggacttgttccggatcaaattgatgcgataaaggctcctttctctaaagagtgcaacaagcaattgctggcgcgctcgaaagcggaagtatttgtttctaaagaaagtggaagtattggtgggattcgggaaaaaatcgaaggttgtcaagaacttggaatggattgtgtgattatttcacgaccaattgtcaattatcctaaagtagtatcaactattgaggaattggcaacccatttaaagaaagaggtgaatggatgagaggctttgttagtttagtaggtgcgggtccaggggatgaagaattaatctctatcaaaggagcacggagactagaagaggcagatgttctcatctatgaccgcttagtcaatcctatgcttctgacctacacaaaagccaactgtgaaaagatctatgttggcaagattcctaatcaaccatgtgtttctcaagaaaaaattgaagaagttttggttgcaaaagccaaagaagggaaaaaagttgttcgcctaaaaagtggcgatccctatatctttggccgaggaggagaggaagctcaaactcttatccaagaagggattccctttgaagtagtaccaggaattacctctgctatagcagggctagcctatgcaggaattcccatgacctttagaaatatcgcgactagctttcatgtctttactggccatctacaagatgccagtgaagcactgaattgggatgcgatttcccacttaaaagggacgctagtcttcctcatgggaatgaaaaacttgcagaccatttgtgaggaattgatggttcgtggttacgataaagaaactccagttgcgattatcgaatgggcgactcaccctcaacaacgttccattgatggaaaattagagaccattgttgaactggctgaaaaacaccagatgaaagcaccaagtttgattgtgattggggacgttgttgctttccgtgaggaattaaactatcatgaaaaactgcctttgttcggtcgaagccttttggtgcaagaaactcctaatgccaagcttccgaaactgttgaaggatgctggggcgacagtgtatgcttttcagtcacccactaaattgcttgcaaaagaactgcaacttcctcaactttctagcatcgatggtttagtagtgacagacccaagttcttggaacttctttgttgcctatttgcaacaagaagacctagatattcggagtctcaatcatttgaaaattgtagcaagtgggcatcatactattaagaccattaaagaagcaggtattcgcctctatgatcaaatcaatgatttcgcagaagagaattttgtgcaacgaatgagtgatcaagatggaaactggatcattctaacttctgatattaaggaaaaagcagtagcagaagttttaagcttcccaatccacaccactcattctgtagcctttgaaagtgaatctttcgcttatcatgcagaggatattcagctgatctgtttgccaaactctgctgcagcctaccactttgttttaatggcagagaaaacccaagagaattggaaagagaaaccgattgtcattatgggagacaataccagatctgtattggaaaaagctggctatcatcagttaattgaaacagaagaaagaaccttaaaatcggtttgtgaagcttgccaaactttttttagaagggaaagtgaaaatgagtaaagcgatcattgtcgtcagtttcggaaccacctatcctgaaacacgaagaaaaactattcaagcctgtgaagaaactattcaagagcggtttccagattttcaggtccaccgtgccttcacttcgaatgttgtcattaagcgcattaaagaaaatgaaggaatctcagttccaactgtgaaccaattattggagcaattgaaaaaggatggtgtcaaggaagtttatattcaaccactccacattatcttgggaagtgaatatgaaaaagtggttcaccaagccaaccagtttaaagaagattttgaacttctaaaaatcgggaaacctcttctttttagtgaagaagattatgaaaatgttgcaaatattcttgtaaaagaatacaataatgatgatgtagacgaagcaaccatccttatgggacatggtagtcagcattatgcctttactgcctacgccgctttggatcatatgttgacggatgaagctgtctatatcggctgtgtcgagtcttatcctccggtagagttactcgaaaaacgtctggaagctaaaggcgttaaaaaagttcatcttgctccctttatgttagtggctggggatcatgctaccaatgatttgtgttcggatgaagaaggatcatggaaacacttctttacagaaaaaggctaccaagtagagacacacttgattggacttggtgaatacccaagtgttcaagaactctatgttcaacacttagaaaagattattaaataggagggctaaaatggcaacattttacggtattgggattggtccaggagacagtgaactcgtaaccgttaaagccaaaaatattctgcaaacattggatattttgtacactcctgaagccaaacgcggttctaagagtgtggcattgacgattgcgagtccttatgtcagtgatcatctagagattaaacaacgccactttccaatggttcgttccttagaaaagaaggaacctcaatgggaacaaattgctgctgaaattgtagaagatgtaaaagctgggaagaatgttggctttatcactttaggggatccgatggtctatagtacctatagttacctcttgagattaattgggaatagcattgatacccaaacgattcctggaattacctcatttggtagcatggcttctgtcttggggcaacccttaaccatggatgaagagtcctttgcagttgttcctgctacagcagatgcggataagattgaccaagctctagcgattcatgatacagttgtaattatgaaagtggccaatcatttggatgtgattcttcccttgttggagaagtacgacctgattgaaaaaacatttttagtcagtcatgcctctactgaaaagcaaaggattttgtacggagtatctgacttaacagtcgatgacaaattagattattttacaaccctactggttaagaagaatccattagggtaatgaaaaaggagtgaaattatgaaacaaagtaaaaaaatgttagcaattgcacttttagtattgctgatcatctttagaccgcagcctgtatctgccatgcacattatggaagggtatctacctttagtatggtgtattgtttggttcttgctatttttaccattcttcattttcggtttgataaaaattaagaagattatttcaaaagatccaaattcaaaaaccatgttggccttgtccggtgcctttatctttatcttatcttccttgaagatcccttcagtaacaggatcgagctctcacccaacaggtgttggtttgggaaccgctatgtttgggccatctgtgattagtgtattaggaacgatttgtttgttgttccaagctcttcttcttgcccacggtggattgacaacccttggagctaatgccttttcaatggcagtcgttggtccttttgttggatttgcggtttataaatttagccgttccttgaaattgtctaagccagtatcactcttcttgtgtgcgaccattgctgacttagcaacatacgcaaccacttcgcttcaacttggattggtcttcccagatccaactactggatttgtggggtctaccattaagttctttggagtctttctgattacgcaaattccaattgccattgtagaaggactacttacagttatcttctataacttgatttctgaaaatgtgacagaaagagaggggcttttcctatgaaaaaacacaagaatcttttgttattagcagctattgttgcgattatccttggtgctttcttatttgcgcctaagggagttgaatatagtggtacagatgatgctgcagaaaatgctatttctactatccagaaagattataaaccatggttctcaccattgtttgaaccaccaggatcagaagttgaaagtttgctttttacccttcaagggagtatcggtgcgggaattatcttttatgtcatcggttaccaacgagggaaaaaacaccaagataaataagtcattgtattaagtatttgtaggggaggaaactatgtttgtcattgatcgctatgcttataataaccgttggacggcagttccagtggtgcataaatttattttatatgttttattgatggtcatctcattctcaggtttccttcctttacaaatcttgttaatgattgcgatggtacctttgacttgctatattgccaaagttccagttttaaaatacataggctggtttcgttacccttctgtttttatcttattgagtatggcaacctttgttttcagctatggagaaaatagtcagcagttcttaatggccttccctgttgggagccatggctattttggtattttccaggcttcggcaaaacaagtgcttcctattgtgatgagaatatactgttctttaatttcaacctatttttttgcattaactgttccatttaatcaaatgatgaagctctttaaaaggctccatttaccagatattctaatggaattaatcgtccttatgtatcgctttatatttttagtcttaatcgaatttttgaccattcgcgataccttagatttaaaattttcatttgtaaataagaaaaaaacctatcttgcttggggaagattagccaataccttgtttgtcaaattattggcggataatcagcggttaaatgatgttttaaccttgagatttgctcaagctaaagaaatcaatgaagaggaataaaaatatgttaaaattagagaatattacggttttatttgatgatttgaaagctgtggaccatgtgaatatggaattcatggaaggaaaaatcacagggattattggaaccaatggttccggaaaatctaccctgatgaaggtcatgaccaaacttctcaagccccaagaaggcagtgtgagtttggataatcaggtgattcaagataagaaaaaagccttgtttgcctaccggcaagaagttaatatggtctttcaaaatccggagcaacaattattttataccattgccaaagatgatattgctatggcgctagagaatttaggatattctaaagaggagtgcgagaaacgggttcgagaggcgattgaactgatggacatcgaggagttgcaggaccgacctgtgcaatacttgagttacggccaaaagaaaaaagtagccattgcgggaatgttagctctcaaaccacgttttctattattagatgagccaaccgctgggctggatcctaaagggcgggaccaaatggccatgattatgaaaaaacttgtttccaatggaaccagcattattgttaccagccacgacatggatctcatgtatgactgttgtgactatgcctacctcatcaaaaaaggcaagatcatgacccaagggaccaaatatgaagtgttccaggaagaaaacttgttgttggatgcaggactttctgtcccatggattgtcaaactccatcaggccatccagacgcccctagttgaaaatgaagcgatcctatttgagcagttgaaagaaggatatgtatggcaaaatcgttaatgattcagggaacagcttcagatgcaggtaaaagtttaattgctgcaggcttgtgtcggattttaaagcaagatggctacacggtcgttccctttaaatctcaaaatatggccttgaactcctttatcaccaaaaaaggatttgagatggggcgagcacaggtggtgcaagcagaagcagcgggcgttgatccagatgtccgtatgaatccagtcttactcaagcccacttcagaccgcaaatctcaagtggtttttatggggaaagtcctaaaagatatggatgcagtggattaccatgaatttaaacaagagttactgcctaaaatcaaagaagtctaccaagaattggaccaagagtatgatgccattatcttagaaggagcgggcagcccagctgaaatcaacttaaatgaacgcgatatcgtcaatatggggatggcgcgtctggttgatgctccggttatcttagttgcggatattgacaaaggaggagtatttgcctctatttatggtacaatcgaattaatgccagaagaagaccgcaagcgtatcaaaggggtcctgatcaataaatttaggggagatgtcgccctccttcaatccggaattgatatgatcgaagagctgactcacgtacccgtcctaggagtggtcccttatgcagatatcgatattgatagtgaggatagtgtagctttaggcaataaagggcgcagctttaatcatgaaaaagatttggatgtggccattatcaccctgaaacgcatctcaaacttcacagattttcatagtttagaaatccaaccggacgtttcggttcgttatgtcatgccaggggatgctattggaaatccggatctcttgattttacctggaagtaaaaatacgatcgaagatatgcaagttctccaagattcagggattgtagacgaaatccgtaagtgtgctgatcagggcgtccgcatttttggaatttgtgggggcttccaactcttaggcaagaaaatttcggatcctaaccatgttgaatcagaattggatgaaattgaaggattaggacttcttgatgttgaaacccagatgcaaggaactaaacgaaccactcaggttcaagcagaacatgagggtcaactcttagaaggctacgaaatccatatgggtgaaactgaaatttctgatcaggtatcgcctttctctcgcattgtccttcagaatggtcaagagactagtcggtatgatggtgccgtttcacccgataaacgaatccaaggaacctatcttcacggggtctttgataattctcaatggacgcgcgattatttgaaccaaatccgcatggaaaagggcttggaacccatcacggaccaggcgatcgatctcaaagaatttaaggatttgcaatatgataaactggcagcagttattcgtgatgcagtcgatatgaataagatttaccagattatgaacggagaagagctttaatgagaatttacacaaagtatggggataaagggtttacccgactatatggtggggatcgtgtgtctaaaacacatattcgtgtggaagcatatggaaccatggacgaattgtgctctcaagttggctacctggtatctgaaatgaaggaatacaaagaattagatgatatcagggaagaatgtgaagaaattcagcaacatttatttgactgtggaagtgatcttgctactcctagagaattgagaccttacaaacaacaggagtcagatattaccttcctagaagaaaaaatggatgcttatatgcatattccagaaaagattgatcgcttcattattcctggtggccatcggatcgccagtctctgtcatgtagctcggaccatgacccgtcgattggagcgaaaaatggttgctgtcattgaagcggatgaaatggtcaatgaagtcggcttgatctatatcaatcgcctgtcagattacttctttgtcattgctcgcttggtcaaccatcgcttagaagtcaaagatacagtctataaacgaagtgctaagatttttagagaaagaaaagagggagaatagtcatgtatcccgtcatgatgaatatccaaaataaaccagtcgtcattattggtgggggaaaagtagcagcccgcaagattaagactttattgtcagaaggggcgaaggttactgtgattagtcctgaaatcaatgatgcaattcccaaggcgcaggttgaatggattcaaagaagctaccaaacaggggatttgcaaggagcaaaactggtatttgcctgcacagataaccaggaagtcaataaaaaagtgatggaagaggcacatcctagtcagttcgtcaataatactggagataagaaaaattcagatttttataatgtggctattgcttcaaataaggaactttccgtcatgatctctacaaacggcttatctccatcgcgctcaaaagaagtcagaaaaaagatagaacaacttttagatcaattgtaagaacggggaggacagaatgtatttattgtatgttggtgttactcatcgtgtagcaccattatcatttttagagcgggttcatttttctgatgaagagaaaaaagaagccctactcaaattaaaagcggaaaaaagtattctggaagatgtcatcctttcaacctgtaaccgaacagagttgtatctggtcgttgaccaactgcatactggtcgctattattccaagcattttttagcagattggtttcagattgacatcgaagaactagagccttatcttacgtttaaagaaggtaatgaggcattagaacatttatttagagtatccattggcttggattccaagattgtgggtgaaacgcaagttctcggtcaattaaagcaggcctttttgagcgcgcaagaaactggaacgacaggaatcgtcctcaaccaagcttttaggcaagcagtgacctttgcgaaaagaatgcacgatgtctaccggatcaatgcccgtcccatgtcaatcggtttgacctctttacaaatgttggataaggaagaccttgattatgagaatacaaaaatcgtagtcatcggattaggggaaatcggccaattagtgaccaagtatgttttacaacgtccctttcagtctatccgcttggttaaccgtaccctttccaaggccaatccttatttaacagaagatcgtattcaggcttattcttgggatcagttagaagaagccgtgaaggatgcggatattattttcactgctatcaagtctgaaggatatattctctatccacatatggtgaaagcaggagcgattgttttcgacttgtgtttaccacggacctgtcacccaaattcggacattaccattcacaatatcgaaaatattaccagtgaattgcaagccttttttgaagaaagaaatgagatcgctaagaatatcgaagcagagatctctagtgaactggtgagttttgaagagtggaaacagcagttaggcattattccgctgattcaagagattcgagaaaaagcgattcaggctcaggaatcggccatggaaagtttattacgtaaacttccagatttgacagaacgagaaaagaagcagatttccaagcatatgaagagcattatcaatcagatcttgaaggagcctttgttgcaattaaaagaaatgtctgtaggtgaaaactcagaatatgatattgccttaattgctaaaattttcgatcttcatagtggaaagggagtaaaccatgagaaggattaaagtcggaacgagaaaaagtcagttggccatgacccagaccaaaatggtagtccagcgcttaaaagaatgccatcctgatgttgagtttgaattagtcccttataaaacccaaggagatcggttggttcatgtatctctgcaaactattggtgggaaaggggtcttcgtcaaagaaattgagcaggcgctcttaaataaagacattgatattgctatccatagtttaaaagatgttccttctatccttgtgaacggatgtaccattggggccattcccgagcgagaagatgttagagactgtctgatttatagagaggaaggcatgacgcttgaaactcttccgcaaggggcagttgtaggaaccagtagtattcgacgtcaggttcaacttcagagtttaagaagtgatctccaattcaaacctttacgtggaaatattgattcgagaatccgcaagttacaagaaggcgaatgcgatgccatcgtgctagctgctgcgggcttaaaacggattgggtatttggatcagttaccctctctcaatatagaatttttagatccacatacatttattcctgctgtttcacaaggggccttagcagtcgaatgccgggaagatgatgaggaagtcctaaatctattggctgcgattcatgatcaggaagtagaaaactgcatccaattggaaagaagcttcctaagtttgatgaatgcggattgtaccttcccggtaggagctcatgctcaatatatcgaggggcaataccagttgaagaccatgttggcagatggtaaggatcgttgcctgtatgtatctctcacttctgaggatgggagcgatcttcccaaactggctttggagcaattaatggaaaaaggagccttaacagacaaatggtgggaagcttaattatttttacaagagaacaagaaccttctgtcgaattacaaacgttactggaccagaaccaagtcagatggttgcatgcgccactcatttgcacacaaggcaatccccttccactcatttttgaagaaaaactggccaaagctgattgggtcttttttacaagtgccaataccgttcaattatttcttccctatttgagacccgatttaaagattgcctcgatcggcagtcagaccagtaagttattaagagagcatcaactagatgtcacctttgagtccagtagtcagtatggagtggactttatcaaggagtgggctagtcaatatggggaccagcaaaacattctcttccctcatagtgatttggccaatccgacctatccaaatatgttacaggagttgggacatgacgtttatgcttggccgctttatcaaacggttgccaatcaagagggagtcgctaaaataagaggcatcttgtccttagaggaaaaatgtgtatggacttttgccagtccgtcggcctgggatgttttttatcaagaggggctttcattgccaaagcatcaccaaattggtgtcattggagagaccacagcgaaagctgttttagattgtggtgcctctgtcaactatatgccttctagtccctccatgctacaattggtagaggtaatcataaaggagatacaagatcatgaattttaaaagacatcgtagacttagaaaaaattctctcataagagatttggttagagaaacgactttaagcgtcaatgactttattcaaccgctttttgtaaaagaaaatctagagaaaaaagaagaagtggcttccatgccaggtgtttttcaatttgctttaacagatcttttagaagaggtggaatcttgtgtgcaacttgggattaaagcctttattctatttggaatcccagcagaaaaagacgaagttggttcacaggcctctagcccagacgggatcgttcaaaaagcccttcgcttgattaagcaacattacccggacctcattctaattgcggatacctgtctctgtgaatttactagtcatggacattgtggcatcctagatggtgaaacggttgtgaatgacctttctttggaccgcttagtccaagtagctattagccaagcagaagccggggcagacattattgctccttcgaatgccatggatggatacgtcgcggcgatccgtgaaggcttggacaagtctggctttgacatggtaccgattatgtcttattcggttaaatttgcctctagtttttatggaccatttcgggatgccggtgaaagtgcacctgctttcggcgatagaaagacttaccagatggatccagcaaaccgtttagaagctcttcgagaagctcaaagtgatgaagaagaaggagcagatttcctcatggtgaaaccagctcttgccttcttagatgtcttgagagatctaagaaatcaaagtgatcttcctctagtcgcttataatgtcagtggggaatacagcatggtgaaggctgctgctgcccaaggttggattgatgagcgtgccgttgtcatggaaagtcttatcggaatgaagcgagcaggagcggatttaatcatatcttattttgccaaggatgtagcaggatatttgaaaggctaggatgaaagatgaaacgaacacaatcaaatgattacttcaaagaagcagaatctattttcccaggtggtgtcaatagccctgtacgagcttttaaggcagtaggtggcaatcctcttttcattgaccattctcaaggagcttatctctatgatgtggatggtaatcaatttgtggattatgtgctctcttggggacctatgattttaggacatgctcgaaaagaagtgcttgaggaagtgcaagaggctctatgggaaggaaccagttacggtgctccaagtccacgtgagattaaattaggaaaactgattaaagaacgcttgcctttcgttgagagaatccgtatggtcaattcaggaacagaggcaactatgagtgccattcgtttagcgcgtgggattaccaaacgaccaaaggtagtgaaatttattggttgctaccatggacatagtgattctttcttggtacaagctggatctggtgtagcaagttttggcattgcagattcggcaggtgtgatacctgaggtggcgcgtgaaaccattgcccttccttataacgatctagaagctttacggacctgctttgaagaacacggtgcagaaattgcctgtgtcatcgtagaagctgttgccggaaatatgggcttgattccaggtcacaaagaatttattgaggagattcgccgtctcacgacagaagcaggttcactcttcatcatggatgaagtcatgactggttttcgggctcattaccaaggggcagtgggcttgtatcaagtcgatccagatttgatctgtctaggaaaagtcatcggtggtggtttcccagttgctgcttttggtgggaaagctcaatacatgaatcaaattgctccactgggcgatatttatcaagctggaactctatcagggaatccaatcgccatggcagcgggctatgaaaacttgcgactattgaccaaggaagtctttgatcaaacggttgaaaagacagactatctctgtcaagggatccgacagttagcagaaaaacatgggctagccctccaagtggtctctgttggaaccatgtttggatttttcttctcagaaaaaccagttttgaattttgaggattccaaacaagcagatcaccaactttttgccaagcttcatggcttgcttttagaagaaggtgtctatattgctccatctcagtatgaaagcaacttcttatcaagtgcccattcctttgaagatttggatcgtactttaactgcttttgacaaagcctttagtcagttgtcatgaaaggaagattatggggaagattgttttagtcacgggcggtgctcgtagtggcaaatcctcctttgctgaatctaaactcttgcagaaggatggggtttgttacatagccactggtctcatgatgaaagaggatccagaatggcaggagcgggtcaagctccatcaagaaagacggccacaaagctgggatacgcttgagcagtactgggacttagctacctggattgaacaagaccatcatggggattatttattggactgtgcgaccatgttaactaccaatcggctctttgatttggtcaatgagtggtatcccgataaaggctacctatcggacgagcagtttttaagtaaagccgaacaggcccgtattttggaagccatggaagccgagtggtctcagatactttcggccatgaagaagcgccaagctactttttggattgtcactaatgaagtggggcttggcatcgttccggacactcgtcttggacgatactttagagatcttcaaggtcgggtcaatcaattaattgcaaaggaggcaagtgaagtctacttagttatttgtgggctagcacagcagttaaaatgatttcagcactcattatctatacacaattttttagtcggattgtgattcccaaagcggttgatctctcctatgttcgaaaaggagttccaattttaacgctttttggtctcctactaggtctcatttcctccttattttttgttttaacttctttggtgcttcctgagaacattgcttgggttttgaccttgttctttgatgtgcttctcaccggaggctttcatttggacggccttgctgatacagcagacggattgttctcttcacgttctaaggaccgaatgttggaaattatgaaagacagccgtattggaagcaatggtgtcttggctttgattttctattacggccttatgatcgcgatgggaccttatcttcctcaacctaagtggcttattgtagcttctttatcgatgattgggaaggttggtttaaccatgcagctttacaagatgcgctatgcacgtgaatcaggtggctctggaaatttcttttctggtacaaaaactagttcgatccttttagctcagattgtcccactggctgtccttattggaggtttttggttaaaagggctccttgcttatagtttggtcattctagggactcttgcctttcgctggttcgtttaccaaaagattgacggggagacaggagataccttaggagcatcagtagaagtagcacagatattatttttgttaggaatgatcatatgacagtaaaaaagtggtacctgattcgtcatggggaaacagactttaataaaaaacgttttttctacggaaaagcggatgtttctatcaatgaaacaggaaaagagcaagcaagtcaaattcatcagttgctgaaaggaagagccatttctcggatctataccagtcagctcaaaagaactctagaaacagctgccattatttttccagatcagatccccacagcatataaagcattgaatgaaagagatttcggactatgggagggaagaacggccaatgaaattcaagctgcctttcctttagtttgggaagaatggttggaaagtccctttgacgtaactccatctaaggcagaaccctttcaaaaatttaaagatcgggtccaatccattgtcgaagagattcgtgaaacagaggatgatgaaattgcgatagttgggcatctaggtgttttacgcctgatttatcaatttttagtagatccagaagctgatttttggtcgattgatatccctcaaggcactgttttactcctagaaaacaaggatccttgggaagaaacgttgcttacagaaggtggcgagaaggatcccgcaagcgaaagctgatgaagatggaaactgggtcaagaaggtaagagaaattttcttttgttcttactttcttaaagaaaaaaatatattaataggatgaggatacaaatgaaaaaatggaaattacttttaggaacagctttagtaagcgtcgctcttcttggttgtgcaaaaacgaaaaaaccttcctcacctgaggaagcaaaaaaagctcaaaccgtcaccattggttatacccaattcccaaccaatattgatccggcagatgaatataatggttggtttactgttcgttatggagttggagaaaccttatttaaaatggatgatcagttagtccctcaaccttggctagctgaaaaaatagaacaaacttctcaattagagtggaaaatcacccttcgcaatgatgtaaccttccaaaatggggaaaagatgactggtgcgaaggtggaggcttctttaaaacgactgattgaaaagagtaagcgcgcggctgctgatcttggaatagagagtatccaatctgacggtcaaactgtgaccatcaaaaccaaatcagaacagcccatcatgaagaatctattagcagagccttactctgttattgtagacgtagatggaaaagctgcctcagataaagctccagtagggacaggcccatttttaatcaagacctatacgccagaaacaggcgctacattagaggcctattcaaattattggggtggtaaagccaaggttgcacaggtcaagattaaatatttctctgatccaacagcgatttctgctgccctacaatccaaagaagttgatgctgtttatgggctcccatatgctaatttagcaagctttaaaaaagacaaccattataaaatatctgaaaaagaaggtggccgttacttaagctatgtctacaactttgaagatccttatatagctgatgatcagttccgtcaagctttggatactttggtcgacaagaaaacttatacagaatccctctttaaaggagctgctgttccagccacaggacctctcccttctagctctgattttgctttggataaaagtgttcatgagttcaatgtagaaaaagcgaagaaactgttagatgaggctggctacaaggataccgatggagatggctaccgtgaaaaagatggaaagaaagtcacgattgaattgctctcctttactcgtttaccagaaatgccgttagccattgaagcttctcaacaacaattaaaagaggttggaattgaagcgaagattcgtaaggtggaagtgagtgccgtcgcaacggagaaagattatgccttcacaccttatgctgtagtagctgctccgattggcgatccatatgcttactttaactcagctgtcaaaactgggggagtaggaaatatcggtcattatagcaatgcggaagctgatcagaagatcgaagcgctagcaactgagaccgatcagaaaaaacggatccaattaagcaaggacattcaagcccttgtggataaggattatggttatacaatcattggattttataaagttgccatcgtcatggacaaatccatctctcatttggaatcccatccaacagattattaccatgtaacaaataaactctcgaaggagtaaagctatgttgcaactgacgaatgtcacggtttcttccccgtccaagattattttagatcaactttctctaaccgtttcggcaggtgaagcagtcggaatcgtcggagaaagtggcagtggcaaaacaacgattttaaaactgcttttgggtcttcccttgaatgacttagtcattacccaaggcagtatttcttatagggatcaggccatcagcccacaaaagaagcgggtttcttatccctttgtaggaacagaattggcctgggtgacgcagcagtccagtctaggttttaacaacaaccgtaaaatcaaagaccattacgaggatctcgtcaagagtcatcgctctcaagtagaaaagatgagatctttagaggaatgcctccagatggttggcttagatccagcacaggtaccatcaaagtatccttttgaactcagtggaggtatgatgcaacgagtggccattgctttggccttagccactcatcctaaattgctcttggcagatgagccgaccagtgccctggatgttctctccaaggaatcgtttattcaaaccttgattcaattgctaaggaccgaagaatccagcctcttatttgtcactcatgatatgagtgtcgctaaaaagttggcagataggatcttggttatgaaggaggggaggattgtggaagaaggaagacgcgaccaaattttccaaaatccgcaacatccctacacccagaaattactaagggctattcccaaactaaaattgtagcaggagtcaccaaatgacctatttactcgaatgtaaagatctcactcatcattatcaagatccacttcatcatcaggctggtgtttttgatgtatcctttactctaaataagggtcatcggcttggtttggtcggagaatctggttcgggtaaaagtaccattgccaaaattctgagtcgactcctggatgtgcaagagggaaggattcagtttctggggcaatcgctgacaagttttactgaccttgagttttacaaaaaggtccagtacatctctcaacagcctcaagaagcctttcatcccaaaaggaccttacaagcaagtttagaagaggtttgccagaattttaagatttgtaagactaagaaggagatggaagagaagattcaccaactcctggaaagggttggcttggatcctgtcctggcccagcaatttccccaccaattaagtggtggagaatgtcaacggatggccattgccagggctctcttggtccaacctgacttattaatttgtgatgagatcaccagtgccttagacgtgaccgtccaagagggagtgatggaactcttagaagagattcagaatagctcccaaacatcttttctctttatttcacacgatattgcgctggtcagccaattttgtgatgaaatcatggtactaaaagatggaaaaattcaagagaatggggtgatgtcagacgttttgcgaaatcctcagtcggactacaccaaactgttgatgaaaccttatcaggaagaaggaagggagccatgacaagatatttcatcaaattactatttcaaatggttttgatcctgctctgtgttagttttctttctttcttgttagtgtatctggctaaaggggaccctgcagaaagtatcttaaatgcgcaaggaattccttataccaaagaactactagagataaaacgagctgagatgggcttaaacgatagttttattttgcaatatctgagatggttaggaaacatcctccagggaaattttgggatcagctatcgtacaggagccccagtttgggatcaattggtcttttactttccaaatacgatctatctagggatccacatcttgctggcaacccttgccatatcccttcctctctcgatttatgcagcctatcatatcggtagtcgactggatcgattgataatgacggtctgcgcatttttaaatgccattcctagttttgtcattggaattctcttgatgcttgtcttttcagtcaagcttggctggtttcctattcagtcaaccgcaaatgaatggggcttaattttaccgatttctaccatggcgctgaccatgtctacacgctatattcctcaattgagaacggctatcattgatgagctgcagtcgccagcagtagaaggcgcaagaggacgtggcataccggaaggtcgcattctttttaaggatgtcttgtataatacccttccctttttgttgacattggtgagtttgtcactgggttctctgttaggaggtgttgccattatagagtatttattctcttggccaggcatcggaaaaatgctgattgcagttgtggtcaatcgggattatcctctggtccaaggagctgttctggtgattacacttggggtattgcttgtcaatttcaccacccaagccttgatcacctggttaaatcctaaggcccgtctatcgcaaccaacccacttccttctttttaagaaagaggctagtcctaaaggaaatggaggctaagcgatgaaaaaagttagtaaccgcaacctctatctcttggctggatgccttctcttggtcctcttgatttcttgtctgtctcccttctttttaggagacagcattaccaaggtccatttaggaaatgccctccaagcacccaatagtcaagaatggtttggtacagatgccgtgggccgctctgtatttgctcgaaccctaagtggtggggtacaaaccattgtgcctgcagttgggatccttctctttgtcaccctagttggttcttttattggagtgaccagtgccttgatcggtgggaagttggatcgtgctattttcttgtttattacggcttttcagtcctttccatctatcgtcttagtgattgctattgtgagcctgttaggagtaggtttgcaacaaacggtcatagcgattggcttaacggcttggaccaaatatgcctacatcactcggtcgctgaccctgcgtttaaaacatgaattctatgttcaatcagcaaaaatgtacggaaataacttttggaacaccatcaaaaattactatgttcctagtttatttccgcaaattgtcactaccatgacttttaatgtttcgacgatcatcatggagattgctggccttagttttgttggactaggcgcgcaggctccgtctccagagtggggagccatgatgaacgatggtcggacctatatccaggaagctccctggattgtcgctttcccttgcatcttcttaattgggatcattttattggttacaaaatttggagatgctctacaaacttatgtgaatcaaaaatattaatcatgaggtttatctaatgaaaaatttttggaaattagctgttactagtttagcagttttgtgtttagctgcctgccagcaaaatggtaagtcttcagacagcagcgctgagaaagataagattaccctcgcctggggagaagactttggagatgtcaatcctcacgtatataatccagatcaatttattattcaagatttggtgtatgaaggtcttgtccgttacggagacaatgggaaaattgagcctgccttagcagagagctggaaggttagtgacgatgggaaaacctataccttcaacttgagaaaagccaaattctcagatggctctgatttcaacgcagctaatgtgaagcggaatttcgatacgattttctcaaaagaaaacaaaggaaaccatgaatggtttaacttcaccaatgtattggatagttacaaagttgttgatgatcatacctttgaaattacccttaaagaaccatacagtgccacactttacgatctttctatgattcgtccaattcgtttcttagcagatgccagcttcccggatggtgatgatacaactaagaataaaatcaaatcctctattggtactggtcaatgggtggtcaaagataaaaaatctaacgagtacatcacttttgcacgtaatgaaaactactggggtgaaaaaccaaaactgaaagaagtaaccattaagataattccagatgcccaaacacgtgctttagaatttgaatctggtaaagtagatttgctttatggaaatggtgttattggtttaaataccttcgctcaatacaagaaagataagaaatatacaacggatgtttcgcaaccaatgtctactcgcttgttgctcttgaatgccaaacaagaagtcttccaagataagaatgttcgtaaagctattaaccatgccattaacaaaaaagaaattgcagagaaattattcatgggggcagaaactcctgccgataccatcttctctaaatcaactcctcactcagatgctggcttaaaaccatatacatttgacgaaaaagaagcagaaaaaatgttggatgctgctggttggaagaagggatctgatggaatccgtgccaaagatggcaagaagatggaattgaatttcccttacatttcgacaaaagcaacggataaagatcttgcagagtatttccaaggcgaattgaagaaaattggtgtcgaagtgaaattgacggccatggaagaagacgattattgggcaaatgcgaaaacaggaaactttgatatgatgcttaccttctcttggggagctccatgggaccctcacgcatggatgacagcattgacagctgagtctgcacatggtcacccagaaaatgtttctcttgaagcccttccaattaagaaagaattggatgaaaccatcaaacaaaccttgacagaagctgatgaagataaagtagatgctggctataagaaagctttgaccttgctccatgaggaagcggtttatatcccattgacttatcagtcagtgatctctgtttatcgtacaggtgagttgaaaaatgttcgttttgctccagaagaaaatgcccttccagttcgctatatcgaaaaagtgaacaaataaggacaaggtcttgaatgaagtagacaatgtggcctccatcaaagtgactttccttttattttgatatgggactccgctttagaggatcaatgttgatcttttaaagcggatcacattgttttaggaactaagttttatatgatatgaaagctatttttaaaaaaattattagttttataagtggtttacttgttatctctattatcacctttatccttacaaaatttacgtcgcaggatccagcagagaattatctgcgaattcggcatttgccaatcactccagcagctcttgaaaatgcaagaacctatttgggtttggataaatcctggattgaacaatatttatcctggttcgtaaaagttcttcacctagactttggaacctcttatttactgaaggaatccgttgtcagtttaattgctagtcgttttctatccactttttatttaggactgacttcctttattcttatcattgtcgtttctattcccattggggttatcagtggcttgaagaccaattccttctttgacaaatgtattcggttccttgcttttagctcagtatccatgcctgccttttggttggggtacatgttgatttttattttttctgtgaaattaggcttattgcctgtatcgggtaaaaatgaacctttaagcatcgtcttaccaagtatcaccttaagcttttcactgattggccaatatattgccttggtgcgaaaagccgtatcgacccagctagaaagtcctcatgttgagaatgcgcgcatgagaggtgttaaactacgctatcttttacccaatcatattcttcgaaatgctttgccctccattgcgactggcttaagtctaacctttgtttatttaatgaccggttccttgattgttgaagaagtcttcgcttggaatggattaggtagtttgtttgtagaggcgattcgatcgatcgatactcccttaattcagggatgtatgatgttatttggcttgctattcttattgaacaacggtgtgatgcaagctgtcaaccactggatagacccacgagtaaggaagagaggagatagttcgtgaaaaaaagtgtgatgttttctattttcatattaggtctcttgctttttcttgctttgtttgcctcctttatagcgccttatgatcctcagtatgtggatgtttccaataagctcctaagtccgagttctcaacatcttttaggaacagaccaattgggaagggatgttttctctagactcttgtacggggcacgctattccttattcttagctgttgcgattagcatcttggaagtagtgactggctttatcgtaggcttggttgtagggtggtatcagggaaaattggaaggagcctttctttggtttaccaacgtcttgatggccttcccgagttttcttctctccctagctactgttggaattctaggacaagggatgagcaatatgatcattgccattgtcattatcgaatggatctactatgcaaggattgtgacaaatctggttatttctaccaaacaagagccctatgtgattagtgctcagatcatgggaatgggatcatttcatatcctcaaaaagcatattttgccttttatctacaagccagtactggtgatccttctcatgaacatcgggaatatcattctgatgatttctggattttctttcttaggaattggtgttcaaccaaatgtttcggagtggggtttaatgctacatgatgcgcgtgcatatttccgagttgcaccttggatgatgatcgcacctggcttagctatctttttaaccgttatttcttttaacctatttggtgaatatatcgaagagaaaggagagaagaatggcatcattcatcattaaagatctttctcttgtagatcaggaggagtctcgtctagatcgggtttctttcacccatcccttaggagaatccctattagtggtgggagaaagtggatcagggaaaactctcttaaccaaggctttaatagggattattcctcggaacatgaaacagaccggatcgattcattatggagatctccatctcgattctttttcagacaaagactggaacgcctttagagggcagaagatcgcctacttggttcaaaatcccatgtctatgtttaatccctttcaaacgatttggacgcatttctatgaaaccataaaaagtcattcaactctttccaaaagtgaatgccacaagaaagctctcgacgttttagaaaaggttcggatcgcaaatccggaagcggttctccatcaatattcctttgaactgagtggaggtatgctccaacggattatgttaggcattatcttatgtctagatccagaaacgattatactcgacgaaccaacctcagcagtcgatcgtgtgaaccgtgagatgattcttagtttgatcaaagtcttactggctcagcacaagacggttattactgttacccatgactattatttggcgaaggaactcggaggcaatatgttggtcatggagaaggggaaggtagttgaatttggcaaaactgaggatcttttgacagctccaaaagaaagctataccaaggaattattcttagaacaagatttgaagcaggtgatcagaaataatgctggaatgtaaagatattacggtcaactatcaaggaaaaactgtattagaccattgtaatctatccataaaaaaaggtgaaattgtcggaattatgggagaaagtgggagtggcaagtccaccctggcaagagtcatcttaggaattgaaaagccaactcaaggccaggttctcttagatggtaaaacctattccatcaaagaggatggcgttcgcatcttagttgttttccaagattcttttcacgcagtgaatccacgatttagtgttcaagaaatcttgttagaagctcttcccaaggattttccgatggatcaggtccacactgttttaaaagaggtcggtctaccatcagaagtactagaaaaaagagcaagagaattaagtggtggccagctgcagagagtttgtattgccagaaccttgctcctaaacccagatatcattatttttgatgaatccctcagtggtttagatcccaaaacccaggttcagattttacaattgctttataagattcatggtaagtatcagaatacctttatcttcatcgcacatgatgagcaattgtgccgggccatttgtgatcgcaccctgatcttagaaaatggtcaatttacccgcgaacttcaggatgtagcaggagcgacctgatcttccaaggaaacaagaagcaataaaaaggagaaatgtgtgaaacaaacattcgaaacacgtaaattatattttggatttcctgtatttttcttaggatacaaggatgaggtacatggctataatatttcgacctctagctcagcctatactctgggaagtatgatggtggtcgctatgagaacgaaagggaatgccgtcacagaaattaaaaaacacggttccttcaccgtgaatatccctaccgaggagctcttaacagaggttgaaattgctggttttaatagccgcaaggacaagtttgctcttacaggtctagattatacaattggggagacagtagacgctccaatggtgacggcttgtccagtttccattgaatgccaagttgttgaatttgtagaatgcggagcattgaccaatattatcgctcgagtaacccgtcgtgaagtagaagaagacttgattgacgaagatggtaccttcaagagcgatactttctcaccgatcagctatatcggagatggcgctggtcgttattatagaaactataaagatggtggtgttcagatgggaagcatcatcaagaaaatcagagaaaatgaagaatagcagaaaaaggctaggggacccgtagcctttttactttccaagtgccacctttcgaagaagggctttgcgttttcgttcctctaccatacttagaaactcttggtaggctttttctaggtcagattggtatccttgtgggaccttaaattccaactgatctagaaagacaggagcactggcccctttgtaaatttccccctgaaagaagtagtgcttgctgacaatgtcgatagagagttgcgaagaacgccagcgtctgttgcgcgtgtgtttaggtttccatcgaagttttagctgttgatctcgcaagtaccagcccatgatttcaaggctagccctttgtccagttttagggtccagatagtcagctgggatgcttaagaccttgcccccacgtttactatataagaagggatgaaaatcgggaatgaagtcatagtctttactggagacaaccgatagagcatcaggatcttccacctgagaacggctcgtatagcgaaaaggatcaaagtctgacagtttttttgctgttcttttccactcgagttcataagccgtgacctggtcccctatagtacgtgtcgactttagaaaagaaaggacgtcctcgtgagcctgatagagagcaacgatgttctttaaccgcgcttcttcagaaaattcgtaaagatcccgagggaaagccaaaacgtagagagtatgcagagcttcaagaggtacagcagcgatgccctctaagagctcctgacggtcgatgagactagcatgggcaaataaaagggtctgcccagaatcttgttctagatcaattacaaacagttgcatctctctttttaagcagagaatgaaagtctccgatgtttccttctcaaaacgaaccaacgggatggaagaataatggtggtagggttttaaggcaagataagtccctaaagtttctgtgatatagtgcatttttctattgtaacataagaaaggaagaactcaaaaaaaccactcccgaaagggaagtggttctgtgttggttcttatttgagaccgtattttttgttgaaacgatccacacgtccatctgcttgagtgaacttttgacgtccagtgtagaatgggtgtgagtctgatgaaatttcaacacggatcaatgggtaagtttcaccttcgaattcaactgtttcgctagagtacttagttgaaccgctgacgaacttgtaaccagtagtagtgtccatgaagacaacagggcgatattctggatggatatcttttttcattttgcaatatttcctttctgccatggtctctttccgagccatagattgttactaagctagtttaccaaatttccaggatcttgacaagtattttcactaattttatttaaattaatgatcaaaaaaatcaccctagctatgctaaggtgatgataatcttattattgttcagattgatttggatcttttggtgcttcaactggttgatcagcttttccttcagtgtgttcgtgtgattcttttttgatttcatctactgcagttttaactgtagtagttgtcacccgtccaactgtttgtgcaaatcctttaccagattcagcaagttcttcgaatgttcctttagtgattttaccacctgacatcgccaagagaccagttacaacaatagcgattgatgcgatcaaagcaaggatcaaaccaaagccaattgaaacgccataaccattgaagtcaacagcatatttgtttacaccaaatagatcgatcaatgttacgatagttgagagagcccctgatacgataacaccaattgcaaaaccttttggtagtgaagatttcacatcgttcaagcaagcaaggacaatcgcaacgactgcgaagataataacgaaccatccatctccgcgaaggccattccagctgtatgaaccaaaggcaccagcattcaggcttgcccatggcaagaaagagctaagaatcgctaccgcagcagagataatgataaacaaacgatttttttccataataagtctccttaaaaattttattagctttattttaccataagaaagatcaaatgaaaaccccatgaccaagataaaaaggctgagaaactgttctcagccttcgtttgtgcgtgccacttcttgtagctctttgtagatttggtcgttttcttcgagggagtaggagttggctccactcgctagtggatggccaccaccattatgtcgtttggcaatttcgttgatcacttttcgtttgctacgcatccggacacggaagtgaccgtcggcctgctcaacaaagatagcccaaacagatacggtatcgatgcgtccaggagctccgacaattgcagcggtctctgaatcacgtagatcgaatttcttcaagagctcttgtgttagggtcacacgcgcagcgccatgttcatcgatctcgagatggtcatagacatagccttgaagcttagcggttttgagattgatcgtatccatctgtcgagcaagtgctgtaaaatcaaagggaatgcttcgaagataggcagcaatctcaaaggtccgagtcgaagtagcaggataaaggaagcgacctgtatcgccgacaatcccagcatagagaagacgtgcagcacttacaggaagttcaagatccaattccttagcaaaaagtgcaatcaactcactggtagagctagactcagtatcgacccagagcagatcgccataagcatcgtcatttgggtggtggtcgatcttaatcaggaaatcaccagtcgtatagcgcttgtcatcgatgcggggagtattagccgtatcacagacaatcaccaaagctccagcatagtcctcatcgctgacagtatccatctcagcaagccaagtcaaggtcggttcatcatagccagttgccaagacccgcttttgagggaagtgcgcacgcaggagatcccgcaagcccacctggctaccaatcgcatctggatccggattctgatgacggtggataataatcgtgtcataagcttgaatcttttcaagaatttcattcattacgttcatacattacctcattttctctgtcaattttaacataagaaaggcccatccagcaagcatttatcactaattaggagctatggaagcggttttacattagttcaatattttggtagaatggataaatagatttagtatgggagggactaggatgattgaaattaaaagtaatgctgagacggctcaagagttagcttcttctttaaaaagtagtggggatgcactttcgggagttgcatcggcttcgaaagatgaacaaaccaaactatctggtaatgatgcggcccatcaagccattgatactgctaaaaccaaagcagaagaaattgcagcggcgattgaatcaatcggaaccaacctgcaaagcgtttcaacaggatttacagcagtggacgaagcgactgctgcgagcatgcaataggttgaaagagtaggaagatgaattacgatcaacaactatcggaattgagaagacgagaagactttctttatcaaaaagaaagagatattgtaaaagaaaagagaaatctggaaaatgaaatgaaccgctttgagggctatagctctgatgcgcaccgttatttatggaatgcatttgaatcctatccttcctctagaaatttttttgaccaacttcaggagggggttattcatgaatcgcgaaaaatttcaaatagttatttagaagagctggatgaattagctattcaaaaaagaaaagtcgaagatgatttaaatgatatctatcatgaacggaaaaaattaatgattgaaaaggagtgtgacgatgggaattgaagtttatcgcggtagtttggatagtcaggctactagcacagggacgatggttgagcagcaactgaaagcctatgaagtactagaaacatcattaacccaaatagaaaattcagcctcacgcttgtcaggccaagcttacgactcatttagaacctttgtgacaagtgtagtccagccattgaaagaggccgggatagctttagcggatgcgacacaagaaagtgtgaaaaagctcccaaaatcctaccgctctgaggtggctgatgaggacttacaggaagaaaagttggtttctgatattgaacagtgtgatcggatgattgctatctttcatgcagagattaatgaaatcgcagctagtcaatcgaccagtgctggagattttcaacggttgcagagattacagcgacttcaaggcttaaacgtattagatggtattgtaaaagctgctagaaataaactacaagaaaaattaaacaaactaagagcatttaatgcaacgtcaccaagcatcttctgggaaattgatgttttagcccaagctattcaaatagctgtcaatcaaattaacgtagcgtgggatccaaatactggaatgtattctattccaaaggatttatcctggtctgatctcgtaaatgaaacgattaagaataaagagtttgaaaatgaatatttgccaacgaaaccaaaggatgtatcagcgttcgaatataaccaatttctcacgggtttacgtgaacaatcagtgaatcttaaagaaatagatggctgggataaggatgccatcaaaggttatgtcaaaggcgtttcaaaaagaacagcagatatcaagacaggtagcgagttaaatgcaaggagagatgctttatatgcggaaaccaaggagattggatccgatatttatacagagatgtatgctagtagtaaacttgattcaaaagcgaaagtaaatctggttcttaagcaattgggtgcggaaacggacaaaaagcagtttatgcatttaacaagtcaaactcataagatttcagaaaatctggcaccacatggggatttcaacatgtatttcagacgagatgtggtaaaagccttcggtgataaacatcttaattcattgaaagatgaaaatcttactgctaaagaaattgaagatgaacttaagaaaattagtaaaaaagaaattgcattgcggcagcaagtccatttcttccgctattatctggatcgtcaagcaatttactatattcggagtcactacgaaggcgcaaatgattatgaaaaactattagcatatggtaaagaaaataatattgaatttgattacacaaccggctctaactaccataaccgctttaatccaaaagatggctttaaacgtccctataatatgaaggttcaagtccctcagggcaattcagctaaaggaaaagatttaaacaatgcacggatggtggaatttattgtgaatttggataccggcgagtttgacagtcaatgggatgcctatgataaacacaagctagcaaatggtcgctataactcagatctaagcgcatattctgatgatgaatttagggaaattgccaatacggaatccttcaactatggtccttcaaaaggtcaaaattcagatgttactaagttttacgaaggtaaacatggaatgcttgatgtggatggtactcctgagccagctactcgaactgaagcaaaaagactatttcgctatgaaaatgatttgggtaaaacagatgaaaaaactgctcatgtaggtcaatttgcggatattgtaaaaggaggaggacatgaagactatgaagcatggcaacgtaatacaaaaggaatgtcagaaaaagaaaaaatggaagagtataataaatataaaagttatgctagtggcattaagcctagcgatcgcgggtataataagtatactcgtagccctgagtacatcaaagagcataagtgatactcattcaatattaataaataaacgttatattgagactcaaagtatttcagataatgataaaaaattatcaatcagtgcaggttttgatttaaaagaaaaagattttttttattaccatggagctgcaataaaaaataataaattgtatggtggtagtcaggaatatagtgctgcggagtattataaaagagctttggatattgagctcacttcagcacttttaaatcaccaaattaatattaaagatataaaagattccaactatcaaatcactcgttcaactgattcattcatcaataaaaaattattagaagaaaaacatccgcctgaatttgaaggtagatattctatcaaggatagtcagttttccaaagtccgtatcacctacaacaaagaatttctaccaacaaaaattgagtggtactataagggtgaagaaggactaaaatggtacacttggcgcacctattcgtatcccttcaaaaataagtctgattttgataaaaagctggatgaagaaatcgaaaatattaaagaaattcaagaggaaaatgagggagattaacctagttttgagataaagctgagcttacatatgtctcagctttttgaatagtttaacacttcactttggatgtatattttgctagaatgtgatagatatgatgaaaaaaattaaaaagagacgatttagcctaaaatccattttattgctgactcttctattgcttactatagctagtatttttatagttgtccaaagaggtaagactcaagaagattcaaaatcgatattagagtatcaaaggtttattgtagttgatgattcaacaaacaaagatcaatataatcataactttgagattggaattgatctgaaaaataagaattattataattctactcaagtagcggttaaaaatgggaaaaaatttggagaatatgagtccgtttcttcgtctgatagttataatggtattctctatgaggaagttacctccgcaattctgaatttaaaggttccaaaagaagagatcgagaagtcaaactttatcattgaacgagatccgaaatctctaatcactaagtcactaatgaaagaaaaaataacacctgaatttgagtctagagttttagataaaactgaccaattttccaaagttcggatcacctataatcaagattatttaccgatcaaacttgaatggtattttaaagggaaagatgggttgaagtggtatacctggagccgtttttcatatccatataagactgaatctgaatttaataaaaaactagatgaagaaatccagcgtattaaagatattgaagaggagtacgagttggagaaggaaaacggataataattgaacgattaaagcaattcaagaagaaaacgagggcgattaggttgtatcagtccaatttcttgaaacgtgtcccttctttcaccttatcgggaaaggtttcgtgcaaaatgcttgaaaaagtggtataatacgggaaatagattttgggaggaaattatgactgtagcgaagattgtttttgctagtatgactggaaatacagaagaaattgctgatatcgtagcggacaaattccgtgatcttggtgtcgaagtagatgtggatgagtgtacaactgtggatgcggaggacttccttgatgcggatatcgcagtagtagcgacttatacatacggcgatggagagcttccagatgagatccaagatttctacgaagatttggctggccttgatctcaaaggcaaactttacggtgttgtaggatcaggtgataccttctacgatgaattctgtaaagcagttgatgatttcgaccgttgcttcgctgcgactggtgctgaaaaaggttctgagtgtgtcaaagttgatttgtctgcagaagacgaagacattgaaaaattagaagcctttgcagaagaacttgtagcaaaagcaaattaatgacaaagaggatggatcgatggattacagcctcgatttatatccaaaataaagaggagacacatggatttagatcagattcgtaaggacattgaccagatcgatcaagagcttgtagccttgctggaaagacggatggtctgtgtcggtcagattgtagaatataaggagcagcagggcttgccagtgctcgatcaaggaagggagagagaagtgcttgagaaagtcggctctctcgtgacggatgagcagtatcgtgcgactattcaagctcagtttcaagatatgatgaagcgctcgagagattaccaagaggaggtgagggtgcgtgactagtctatcgatcaagcaaaaagcacaacagtatgtggtcctaacaggtatggctcttttcattggactcttggttggtgccattgacatgatttttggtcaaggtcttcttctgattggagatttccgaagtcagcattggcccttgattctttttctagccatagcgggtcttgtcatcgtttatctttataaacgttttggtggcaaggcttcaaaagggatgggcctcatctttgatgttggacacgcgcgtgaggaaaaaatccccttggtcttggtgcctttgattatgctgacgacctggatgagccatctctttggtggttcggtcggtcgggaaggtgtagcagtccagatcggtgcgaccctttcgcatcgttttgcccgtcatattaagattccagatgcttcgcgtatttttctcatgaccgggatggcagctggttttgcggggctctttcagacgccactcgcagcaaccttctttgcccttgaagtcttgacagttggggagttgcagttgatggctctctatccagcgctcattgcctcaatcgtggctagcttcacctctcatgcccttggcttggagaaatttgctgtgccactaagagaaacgctgagctggacaccagagaccttgattaaagtcgcccttcttggactggcttttggcctcgctgggaaactctttgctgttagcctttcctggttgaagaaaaccgtcgctcaagtcttgcctaatccttatatccggattgcccttataggggctggactcagcttggtcctcttgaccctccagctgaccaaggtcggcacttatagtggacttggaaccaatctgattgatgtagcttttcatcaggggagtgcccatagttatgactggatcttgaagctcctctttaccgtggtgaccatctcagctggataccaagggggagaagtgacaccgctctttgcgatcggagctacgcttggagtctttctcgctcctatgctgggcttaccagtcttagtcgtggccgctattggttatgccagtgtctttggcagtgcgacgacgaccttgctcgcaccgatcttgatcggaggagaagtctttggctatgccaatctgccattctttgtcattgcttgtgccatcgcctattgcctaccaaaagagtggagcatttattccggtcaaaaagttgcgaaaaagtagagaaaagagctttacaaacctgaaattatctgatatgatagtttctgtgcgtaatggaagcacaaaaatacagtttatccgctgagggaggtccctcaagattgacgaagataggagaataaaatgaatccattaatccaaagcttgactgaaggtcaacttcgtactgatatccctgcattccgtcctggtgacactgttcgtgtacacgcgaaagttgtcgaaggatctcgtgaacgtatccagatctttgaaggcgttgttatcgctcgtaaaggtcaaggacacactgaaatgtacactgttcgtaaaatctctaacggtgtcggtgttgaacgtacattcccagtacacactccacgtgtagaaaagattgaagttgtacgttacggtaaagtacgtcgtgcgaaattgtactaccttcgtgcattgcaaggtaaagcagctcgtattaaagaaatccgtcgttaagacgaacaaggaggcgggagtgatctcgcttctttttttatcggtccccttagttcaatggatataacaactccctcctaaggagtagttgctggttcgattccggcaggggacataaatttatgacgaagagggattttctaattgaatagaaattcctctttcgagactttccttaggtgtaattctatttagtttatatatttttagtattctaaaagagataaaggaattaaagcaaataaaaggtaagtaaatagatagacgtaatctaatttgtattgtctttatctggactatacatccgtatcttgaacaggttactaaaaaggtgctaaattatgaaaaaagtcccattgttagtatttaaaaaaagacaaggtgttttatccttgtctttttcgttttacgttttagtactgcttttgtttcaatgtcaataaatgtgttctttttggagtattctatatattcgaggtaacattatcatggtatagatcaggagagaaacacctccaaatatgaatatcagacctccgtttatgtccttttgaaatagataagtaaatacaatggtacctatcggcatgatagacgtatttagtgtgaacagagtactcattactcttcctaaataatttgtttcaatactactttgaagataggtcatgacgacaatatttagaataacaagagtaaatgctataattcccataaataaaccgccaacggaagaaataatcacttgggtgttagtagttgaaaatgtaatacccaaaccaacgatagcgatggttagaagaaaaagtggaatgcgaattctattagaaagaagtgtattattttcttttttgtctggcaatagtgacatagacacactggctaataacattccaactgcagacattgtttctaggatacctactgttgcattatctaataagagttgctctttgactacaaatggcactccaatgctaatggaagtatagaaaaaattcagtacaacactaactagaataatatattttacaatctgattttcttttaaaaattggataatttctttgaacccctgttgatgcttttcattctgtttaatcttagcttcttgctcttcatgttcatagaagaatttcatggtaagtaagacacctaaagaaaggatatttgcaatgatttctataagaataaagcctgagaagcctaaccaattataaagaatgactccaatagctggggaaagcatggttgcgatagcaatggcggtttgtgtaacagaacttaatcgttgaatttttttatcgtttactaactcgtggatagaggctgaataacaagtatcattgatgttgactgtaatagagtggagtacgacaaacgggattacgaggtataatatagtagatgaattcgttaaaaaataaaaagcataaaacagaagaaagattaaaagcctaaagataaaattataaattaagatctttttatgacggtatctgtctactaaattaccgattggaactaagaaaattaaactaactaaaggatagataatcatattgattccaaaactcattgccgattttgtttggtccagtaacattaatcctaaagcaaaattaaaagcttttccacttaaagaactaataaaactactaataaagtctttgatgatttgtctattagacattttatcacttattaaattcttaatattaatcccctccattcgtttcaacattgcttcggttatctaatcctattcaatcaacctgtgttgtaaggtaattggaatattagataaaccataatttttgttaattaagattttatcaattttactaataaaagtataataaaaaatgtaaaaaaaaattgtatttatgtttactaattatatttctctcttgctttgatattatctaaattgataacttcttacgtacctcttctaaaataggatatattttacaagcgttaaaggatttcaaaatgaaacagattgatttattttgctttttataggttttaaattcacaataggtgctagtactatttatcataccacttgacaccgctttcaaacgggagtacaatgatattgaggaaaagatggcttatctcttttatttaggaggtggcagatatgcaaatctattttatttattctattttctttctattatcacttgtagttctagcttatcttattaagttactcattgctcgtttaaaaagaaactaagtaacattttgcccaaatagtagttatttgggctttttgctatactttagcctagtggattaaatttataaagataggatttagaatattcttattgagtgattttattttatgaaggttgtttataggtaagggggaaaatagatggtttctaaaattgatgtggcttgggacttgtttctggaaggaaaaatatcagaagcaaaaaaattggttgaacaagatttttctattgatgcctgtacagattttagccttttaaatctgatgggatatttattgttagcagaaaaagactatgtttcatgtacacatatttttgagaaatacattttattagctcaactaaatgaagataaagaaaatgaacatattggattacatcaattagcgatgatctacagggaacaggggaatttccataaggctttaaaactcattaaagatgaagagaagataattgaagagcattttccaaatgataatctaaagaaagctgtgaataactacgaacaaggctatgtgagatttaaattaaacaaccttgatgaagctcttacattcatgaatctatcactggaacaatctttagaaactgatgatgtgatttctcaagcttgtagctatagagggttaggtgaaatctatttagctttggaagatacggaattatccaatagacatttcaaacgagctatagaacttttcgaaagtgttggagagtttgaagggataaaggaaattgaggaattgattcacgaatgattttacatttagtttttgttattagtttgcctaaataaaaagttttaatatgctataaattatgtatttgattaaggggaataagatgagaggttgtgatagaaatggaatttctatttattttaattatttttataccttatttcttttatttagaatggaaggataagcctaaacaaaaaaatatgtccttttgctatctttataagttttatatgatttacttgtggtttatcctcataatttccataatggctatcggtattttttcccttggagtactagctgttagaggcgaaaaacttacgtctggtttctttgttttatcttttttaggtatagttctatttagtttctatatttttagtattctaaaagagataaaggaattaaagcaaataaaaggtatgtaaatattaactaagagaactagctaactagcttaagtaaaatataacacggccatgattcatgagccgtgtttttgtatgaatgtacaattgaaaaatttttagttttcacttaaataaagtacataattgacaatgattagctcaaaaacatttttgggttactagaaatcgtagaagttccgtgactaattcttgagcctagggcacttttttcacagcggaaagtctctacagaaaataaatgggaaatgttatataaataggagtttatccaccatctaaagtaactcgtgaatgcgaatttttgtaaatttaaagttaacaagtgatggaatatctaaatataatgaattgatttttgaagaaggaaggagtaaaataaagttaatataatgaccgattagagataaataaaacaagacaaaaaaaggcaccgaatcggtgcacactttttcaagtcggatacggacaaagccttattttaacttgctgtgttgtttcgaatggtcacaaaacttattttttgtatgatataatagaatattttaaaaatgaagggattttctatggagagtgatgtgttttttgattattatttaaaatcacttaggttttattttggtgataggtgtaaggatattggatttataaagtttttgaaagatgaaaataatagttttattacaatagaggattatgttttagaatcattagtagttttgacaaatattttgagtaaggagaggattgtgttttcttgtggatttattcatagcaagggggtagttactggagtagaagtatgtatgaatatattagagttagaaaaattaaataatttgtataagatttagttttgaagaatattaaaaaacataagggaaactgtctatgtgggatgtgtggagttgatagtatcaatgtttctagttatagagctttattgtttcgaacagtcccaaaacaagaaaaacaaaaaaatgatggtctaggagctcgatacattgagcttctttttcttgagaaattcaaatcataattttacagacttttaggtcattaattgattctcccctccgctttttctttgactctcctttcttatttttctaaaatagtaggtgtgtgaagggagattgatatgaaaaaaggtttggtaattgtgctttctgctttggtcttggcttcgtgtggtcgtcctcagaggacggtgtcgcctaagagttcggataccaagcagaccagcacttcggaaaagaaacagtctggtatggatttgaaagccatcaaggctaaggactactcgagtatcaaggggacttggatcgatggtcgtggcaatgagctgatctttgatgataagggcttggtcagcgaggatgtcgagcttgatgcatcgagctttaagcagaaggaccagatcgctgagatgacggttagtgccaagtcgggtgttggaggctacggtctcttgctccttccaaaaggtcagaaagcgggcaaagacgatgcttcggataagtccaaggatcggatctgggctggtcagtcaccggcttatggtgatgatgataattactactatcgcaagaaagagcaaccgaaagatcgggagcaagcagatacagacgatagcagtagtacgacaaagaccagtaaggccaagaagtggaatactcgatcggatggtgaggtcaagtcttcgaagaaggcggataagaatgattatccaggctacaccgatgctcaggtcgaagctgcgcgtgtctgggcttatgtgatcaagtctgtaccgacagaattgagtattaatgaaaagagtgctggtacaaaaatttactttggtgggctaggagttgactatcctaaagatgttcgtcagttgtttacaccaatttctgcagaaggccatgtgacttatgcatccaatggtgatggaacagtcacgatctatcctgtaccgagccactggcaacagtctgctgatgaactcaatagtgaagagtttatgacgcaatttacccaagggatcttggaccatgctgaaacggtgacattgccagacggggatccagacatgattcgtcagattcttgcagtactgaagtaagagagattatggtagaataatattagataaaattttttaaactattaaagatctaatgacctattaggttataagattaaaggtttggtatatcttttacaggaagcttatgcaattttggtcaattacaggtcgttttctacttgtaaaaataaaaggagaaaatctatgaaaaaaactatgtttgctacaatgaccattctctcgctatttctgtcatcgtgcgcgcaaaaagaagtgaagaatgaagacaaaaaagagcagtctactgaacagaatgtaaaagattctacaaaggaaagtaaagaatcagtggtcaaagggatgaatcaagcccctacctcattggttggaaatgaaaaacctaatgtagtatttgcttatatgcttcaaaatcaaatcaatggcgaaaatgagatagcgagagtgtattataatgaagagtatctgatccttgtcttctctgtatcagaaaatatgctatctttagcaaatataaatccaaaagattattgtaagacgctttttgatttaaaagaagagatagtaaagcaatacaatgcaactcaaaaaacaccaagcagtataaaacttaaaatatatgataaagatgagaagctcttggcaacggaggaaaatggagctttggtgattaagtaactaaatttagtcaaccatttgtcgccatctacgttttatatttttctcactaatccacatttattgtttttttaagctgatcctgttacaatgatagtactcggaaaagactgggcttccagcctttttcatttcaccatagaaaggtcttttatgaaacgcaaatcgattttgtttctctatttactcttgctagcgattggcttggcttatgagacccagtcactgacagaaggctggatgtctggtagccagtacgggattgtgggactttcaaccttgatccttttggtctatgcaattcctgctgtctgggctctctttcattttgctaagaagtggaagttatcttgggtaccggttctcttttctttattaggtgggggctttgttgccggttggttgtctagctttgccaatacctatttccatgacatgattcaagcgatcgctccaaatagcgacttttggaaccagtacgagagtgccatcgctgcgccactctttgaggaaccctttaagttgattcctatcttctttgtcctctatttgttcagtgttcgtcgcctcaagtcgatcttcctcttggcgattgcctctggtcttggtttccagatcgtcgaggactttgcctatattcgtcaggacctgccggaaggtttctcttacacggtgtcagggattctcggccgtgtggccaatgcacccatgtctcactgggtctacacaggtcttgtcatgctagggctcttcctaattgtccaagcaagcagaggacgcaaggatttacgtctagcaggctggggatacttagtagctgggtttggacttcattttgtagggaattcaccattctcacaaatcgtgaccgagttgccgattgcgattccagtcttgaatgctactgggctcttcctaatctaccaagcttatcaaaccgtcgagcgattagaacaagcaaaataaaacaaaaaatgcgtatgtgtggaaacatacgcatttttgttattttccaagacagaactggctgaagagttgggtgatgagctcatctggagcagcatcccctgtgatttctccgaggatttcccaggtgcgggtgaggtcgacttgaagcaggtcgaccggcataccgagagccaagccctcgttgaccgcttgcaggctttcaacagctttttcgatgagggagatgtgacgagcgttagaaagataagtcgcatcttgctcaaccagcccagcattttcgaagaagagggcgttgatccggtcttcgatttgatcgatgttttgatttttcagaacggaaatcttgatatgatcttccggcagttggtcgatttcgatcttctctggaaggtcaaccttgttgaggaggatgatgcggttgctatcttgagagatctcaaggagctggcgatcttgatcggtcaggggttcgctagcattgaggaccaggaggaccagatcagcttccttgagggcttttttcgaacgttcgacaccgatttgctcgacgatgtcttcagtctcccgaatcccagccgtatcgaccagtttgaggggaaccccattgatgttgacgtattcctcgatgacgtcacgggtggttccttcgatatcggtaacgatggctttttcttcacgaagaaggttgttgaggaggctcgacttaccgacgtttggacgaccgatgatagcagtagagatcccttcacgcaagatcttgccgcgacgggcggtcttgagaaggttggtcaagagggcttcaaattcactggtcttttcgcggatgatctcagtggttgcttcttcgacatcatcgtactcaggatagtcgatattgacttcgacctgggctagggtattgaggatctcttggcgcgtgttgttgatgaggtcagacagggaaccatctagttgcttcacggctatgttcatagccttgtcagtcttggcacggataatgtccatgacggcttcggcctgggttaaatcgacccgaccgttcagaaaggcccgcttggtaaactcaccaggttctgccagacgagcgccttcacggatcaccaattgcaggatttcattggtcactgcaatcccgccgtgggtattgatctcgataatgtcctcgcgggtgaaggtcttcggcgagcgcatagcccccaccatgacttcgtcgagaatctcgtccttatctggatccacgatatgaccgtagttgagcgtgtggctagcgaccttgcttaaatctttccctttgaagatcttttgcgcgatggcaaagctgtcggttccgcttaagcggacgatcccgatagccccctcaccgagaggagtcgagatggcagcgatggtatcaaattctttagtaatcatgtcatttctcttttcctgtagattcatctctattctatcgtaaagtcagcggacgggcaaggttttgcttttagaactaaaagatggaaaggttttcaaataattagtgaaatctcttacagaatatgctatactgtaatagaatataaaaggaggtctatgatggtaaacctaaaggaacaggtaggaattaaagcggctgagtttgtcaaagacggcatgattgtcggtctcggtacagggtcaactgcttattattttgtggctgaattgggtcgtcgcatcaaagaagaaggcttgcagatcacagctgtcacgacgtcaagtgtgacctatgatcaggctgaaagtttaggcatcccgctcaaggctatcgacgatgtcgaagtggtcgatgtgacagtggatggcgcagatgaagtggatcctcaattgaacgggatcaaaggtggcggtggggctctcctcatggaaaaaatcgtcgcaaccaattctaaagattgcatttggatcgtggatgaatccaaacaagtcgcaactcttggagcattcaaacttccagtggaagtagtgcaatacggggctgaaaatcttttccgtcactttgagcaaaaaggctaccatcctgctttccgtctggcggatgatcaacgttttgtcaccgaccaaggcaactttatcattgacttagatctcaaagtgatcgagaatgcagaagctttagccaatgaattggatcacaccgtaggcgtcgtagagcacggtttgttcttgaacatgatttcaaaagtgattgtagggacaccggatggccctgttatcatcgaaaaatagaaagtaggacagaaatcggtaattcgttagaattcgatttcgtcgtcccacctccgcacagttgagtagagctgtaaaagctgatgaaatcagcgtagtagagcccactcaaccactgcgtcttgctcgacaatccaaaaataattgagaggctaggacttttgtcccagcctcggatcaaccaacggctctcttcttatagggatatggtataatatagctagtttaataaaggaaagaggcagtatatgtcaaaatttaaacgcatgcacttagttgtgctagattcagttgggatcggtgctgcaccagatgccaataactttgtcaatgcaggtgttccagatggagcatctgatactttgggccacatctctaaaaccgttggcttaaatgtaccaaacatggccaaaatcggtcttggaaatattcctcgtgaagtaccattgaagactgtgccagctgaaagcaatccaactggctatgcgacaaaattgcaagaagtctctcttgggaaagacaccatgactggtcactgggaaatcatggggctcaacattacagaaccttttgatactttctggaatggtttccctgaagaaattttgactaaaattgaagaattctcaggacgcaaggtcatccgtgaagccaacaaaccttattctggtacagcggtcatcgatgactttggaccacgtcaaatggaaactggtgagttgatcatttatacatcagcagaccctgttcttcaaatcgcagctcacgaagacatcattcctttggatgaactctaccgtatttgtgaatacgctcgttccatcactttggaacgtccagctcttctaggacgtatcattgctcgtccttatgttggggaacctggaaacttcacacggacagccaaccgtcgtgacttggctgtttcaccatttgcgccaactgttttggataagttgaacgaagcggggatcgatacctatgcagttggtaagatcaacgatatcttcaacggagctggtatcaaccacgatatgggccacaacaaatcaaatagccacggtatggatactttgattaagaccatgggacttcctgagttccaagaagggttctcatttaccaacttggtagactttgatgctctttacggtcaccgtcgtaatgctcacggctaccgcgattgcttgcatgaatttgacgaacgcttgccagaaatcattgcagccatgcgtgaagatgacctcttgatgatcacggcagaccacgggaatgacccaacttacgctggtacagaccatactcgtgaatacatcccattcttggcttatagtccatccttcaagggcaatggtgtgattccagtcggacatttctctgatatctctgcaacgattgcagagaactttggtgttgaaaaagccatgatcggtgaaagcttcttagacaaattgaactaagatgacacgcttcgctctcctcgtaagagggatcaatgttggcgggaaaaacaaggtcgtgatggcagagcttcgagaggagctccaaacgatcgggctggatggggtagagacctacatcaatagtggcaatatcttctttgaatctgctgcttctaaagcagaattggtagatttgctgggacatttctttcgtgatcactacccctttatccagtctttttctctcttttcggctgaggactatgcgcaagatctcgctgctttaccagcctggtggcaggaggatctggcccgcaaggatgttctcttttacacagaaggcctcaatcaggatgctatctgggagctggtctcctctttttcgctcggtgatgaaatcatccatcgtgggaatctagggatttactggggcaaatactcagaagagacctacacaaagaccgcttaccacagacaagtcctcaagatgccggattaccgcctgttgaccattcgcaatgccaatacatttgacaaaattggccaatttttaaggaaatcataaaggagatatgcaatgacattattagcaaaaatcaatgaaacagctgcttttttgaaaggcaaaggaatggaagcacctgagtttggcttgatccttggatcaggtcttggagaactggctgaagaaatcgaaaatgccgtcgtagtagactactctgaaattccaaactggggtcgttcaacggttgtcggccatgctggtaaattggtctacggtgatcttgctggacgtaaggttttggcccttcaaggacgttttcatttctacgaaggaaacccattagaagtggtgactttcccagttcgcgtcatgaaagtattgggctgtgaaggggtgcttgtcaccaacgctgctggaggtatcggctttggtcctggtactttgatggctatcacagaccacatcaacatgactggtcaaaacccattgatcggtgaaaacttggatgactttggtccacgtttccctgatatgtcgaaagcttacacacctgaataccgtgagactgctcataaagtggctgacaaattgggtatcaagttggatgatggggtttatatcggtgtgacaggtcctacctatgaaactccagctgaaatccgtgcgtataagacacttggagcagatgctgtcggaatgtcaaccgttcctgaagtcattgttgcagcgcattctggcttgaaggttcttggtatttcatgtattaccaactttgcggctggtttccaagaagagctcaaccacgaagaagtagtggaagtgacagagcgcgtcaaaggcgacttcaaaggattgctgaaagcgattcttgctgaactctaatccaatgaaagtacgactccaaagtctgccctacggactgaggttgcttctagccaccttatcattagggattgggacgggcctgatcggaattgcctgtcattatctactagaaggggtgcaagagctggcttttggccaagctagttcggatttgctccagcaatttcaagaagctggaggtctccgtagatttttggtcttatgtgtgactgggtgcttggcaactggcttctggtatgtcctgcaaaggcgttataagatcctgtctattcgtcagcaaattgacttagctggagacagggaaccagcgcccttagcccacctccttcattcagggatgcaggtggcaattgttggagcaggcgcatcggtcggaaaagaaggagccccacgtgaggtcggggctcttctagctggtcgtttggcgaaggggttctcactagctttcaaagagcggaaagtcttgatcgcctgtggggctggagctggtttggctgcggtctatcaggtcccctttgccagtagcttatttgtctttgagaccttaggactcgcctacagttgtcagaactttctactggttttgaccagcacttatctggccacctgggtcggtcagtccatcattggtcaggaggccatttatcacctgtccgcagtttcatggtcggctagcagtttcttacaggctattgtgattgctttcttggtcactcccttggctctgttctttgctttcctcgccaagcgggctagtcacaaacggcggaaggacggtacgattctttgggctcttcctctagcctttctagtgctggggagcctagtagcctttttccctatctttatgggaaatggccaggtactagcgcaagccctcttgtctagtcagccgattccttatcttccactgactcttgcagtgaaggggcttatggtttacctcctcttgcgcaatggtgcttatgggggtaccttgacaccatcatttgcccttgggattggttctggctacctagtgaccttgcttttgacagtccttgggattcatctggatcctgctctagggatgttactaggagcgaccgtctttttagggacgaccctagaagctcctctgacagccattgccctgagccttggatttacaggccaaacttggaatttgtctattccgcttgtacttgcggctggtctgtcatacgtgattcgaaagagatgggagaagaaatgatgaaggtacattttgtactgcatgaaacctttgaagtgccgggcgcttatctaatatgggcacaggagcgtggtcatcaagtgaccacgaccaaagtctatgagaatgaagctttaccagagacagtggatgagattgattttttgatcgtaatgggaggacctcaatcgccagatgaaaatcgagaagcttttccatactacgatcctcaggcagagatcgacctgattcaaaaagccatcaaggctgatcgttatattgttggggtctgtcttggtgcccagctcctgtctgttgcttatggcgcgaagtatgagcacagtccggaacgtgagattggggtttatcctgtgaccttgacgcctgaaggactcacagatccgcatgtcggtgagtttggagaaactcttgaaactggtcactggcatggtgatatgccaggattgacagaagatgctgttgttcttgcgaccagtcaagggtgtccacgtcagatgattcgcttcagtcctaaacattatgccttccaagcccacttggaatttgatccagaagcagttgatctcttgattgctgcggacggtgaagaggttatagaagaacaaagtcaaaaattgacctttgttcaaaaacctgaagacattcgtgcttacgattatcgagaaatgaatgccaaactctacgcatttttggattcattaacaaaataaattaaaaagaaaggtagagcatgtgttctgatttgaacacgagcggaaagctcggaaaatagataatctgactgagaaatcaggatttctcgtcagattcctaattttcagtcgctttctggtcgctctttgtatcataaactatgtctatccatattgctgctaagcagggtgaaattgctgataaaattcttcttcctggggatcctcttcgtgcgaaatttattgctgagaatttccttgaagacgctgtttgcttcaacgaagtccgtaacatgtttggttacacgggtacttataaaggtcaccgtgtttctgtcatgggtactggaatggggatgccatccatctctatttatgcgcgtgagttgattgtcgactacggcgtgaaaaaattaatccgtgtgggaacagctggttctttgaacgaggatgtgcatgttcgtgaattggtcttggcacaagctgctgcaaccaactcaaacatcatccgtaacgactggcctcaatacgatttcccacaaatcgctagctttgatcttttagacaaggcttaccatattgccaaagatcttggcatgaccactcacgtcggcaatgtcttgtcatcagatgtcttctattcaaactatggtgaaaagaacatcgagcttggtaaatggggtgtgaaagctgtagaaatggaagcagcagctctttactatcttgctgctcaacaccatgttgatgcccttgctatcatgacgatttcagacagtttagttaatccagatgaggacacaactgctgaagaacgtcaaactactttcacagacatgatgaaagttggtcttgagaccttgattgcagactaatggcaaaattccttcatgatgaatggctctacgatctccaaaattatcactacagccgggctctgcgctctatcaagcagcaggaagaagtaccggatttgttggtgagcttactgcagttaatggcggagcgtcgagagctcaatatccaacctgtcatgaatcaaaagttgagaaccgagttgctagaggcgactggttttcagcttttttggcatgaagatccagaagatgaacagttggccaactacctctatgatctcgaagcgaaattgcgaaatgagcagattattgactttgttcgtgccgttagcccagctatctatcggatctttatgcgattgattcagttgaaaattcctgatattaccaactatatccataactccaaagaatccagttatgaccgttggaagtttgagagcctgcatgcgtccgaaaatcctatcctgcagcaattccacagcgaaagtgtggtcaattcgtccagtttgacggagttgattgtgcagttatatttgccagatagcgtcaaagttgcggcccaacaattgcgggagttagaaaaatcagttcgcattcccctggcccacttgatcaagccctttgatgaggaagagcttcatcggacgacgggtttctcttctcaggattttatgaagaatttgattgaccttgcaagctacacaggcatccattatgatcaagctaacttttattttgatcaggccaatgctgtgatggaagagctactaaaggagaagtagatggataagattgctcaactacaggagatgattgatcagagtcaacggatcgtgtttttcggtggggcaggagtttccacggagtcaaatattccagattttcgaagctcagacggtgtctatagtgttcaggtggggcggcatttgacagctgagcaattggtctcccataccatgtttgaacgctatccagaggactttttcgacttttacaagaagtacttgctctacccagatgccaaacccaatgcagcccatcggtatctggctcggcttgaggagactggtaagctcaaggcagtggtgacacaaaatatcgatagtctacatgaaatggctggttctaaaaaagttttgaagctccatggcagtgccgaccgcaattactgtacgggttgccagcgattttatgatttggaggcctttctagctttagaaggcctggttccacactgtctggactgcggcaaggtggtcaagcctgatgtgaccctctacgaggagcctctcgatatggaggtctttagccaagcagcccaagccatccaagaggctgatctcctgattatcggtggtacctctcttgtggtctacccagcagctagcttgatccagtattttcaagggaagaagctggttgtcatcaataaaaccagtatcccacaagacaaacaggcagacctggttatcgaaggaaaaattggccaagtcttttctaaattaaaaccgtaacagaacacctgagagaagtggcaatccacttgtttcaggtgtttttacatcttccttttgactagcactataagaatgtatttgattatgatataatgaaatagattttcttaaggaggtgtgcatgaagaagttaaatattaagaaaaaatatatctttcttgctttagtgagttttttgattggctacttcgggcttcggtattatatcaagccagattggtttgatttagagtatacttatcataaggtatatcaatacaaagttagtaaaataaaaccacagaaaaagattatcaaagatattaacatcgaaattatacacgatataaaagagcaaaagcctacagatggaaaatggaaagagaccatacgaacagatatagatagttatcgtattgacccaatattacatgtgacttttactgataatagtaaggctgatattcctttacgaacagatcgaattggtccagcatttagttggaaaaatttggatgatgaattatataaaaaattatcgtctcgtttcccgttagcagaaccgattgatgttgttcaatatcattctttagaatctgttctaatgctctatcagggagataccttatttcaaattccagaggaacaaacagtgattcaatttcaggtgaaaaatccaaataatggtaagctacaaacttactatcaatatggttcagaacctaaatttaattattttcgaccagtattctttttacaaaataaagcacacttatttaatgaaaagccagaattttttaatgcttataaccaatctagtcaaaaaaattattgggatagagatttcgattttagacatgctaatttatcgatctcgcaagagtatcgttattatcgtttattttattccgatcgattaagcaatcagccggttggaattagccctacgggacatacatttaaaacaacgattacagatacctatattttaccaaatgaagatcagagtagcgagggtgaaaaagttacatcaaaatcgaaaacatacactgatcaaactgaatacacgtatgaaattcttgacagaaaaaaaccaaaaatcataatagaataatacaagctggagtttagtttatttcaattctagagtgaaacacttcaacatttttatggatcatatttatatcaagtcaatagattagattgttcgggtttgttccttatgttaaaatgtgctagattttctcaggaggtgtgtatgaagaagtttaaaagaatattaccgctcgttttagtagctttaggactatttttctttagtctttatcaatatttgaaaacatctgttaatcctggtttgtttgataggagtgatcagtatattaaggtttataactacaaatcagagaaggtcgagcccaaaaaagcaaaagtaaaagaaattaatcttgagtttatctacgacgataaggctgctgttcctgatggattaacttggtcggaagatcttcggtccgatattggtccttatgacggtggagacgtcattttacatgccgttttagaagatggctcaaaaatcagaatcccgctacaaaaggcgtttcatttaggtccaacatttagtcgggatttagatcgcaatgatgtattagaggaaaaaatgctccctagatttccgaaattcagtacagagtataatcgaaattattcctatgcttattttagtggaatgatgtatgtaggagacaccctctatcaagttcctgaaacagaagctgttacgcgttttgacctaaaaaacccaaaaactggaaagttacaaacctactatgaatatgggtatttgccagataaaacagattctcctgtgtttgtaaaaacaaaaaaagatgtaagtcaagcagacatgcagtctttttatgatgattaccacaacagttggaagggctactgggacaggggagtcgatcccaatcctaaagagttgactagcacctatccatatcagtttcactattataaatggttctattcagatgctctatcgaatctccctctgaaaatagatctcacaggttctgaatttaaaacaaccgtcactcgtacgcagctgataaagcctgatcaaaatgatcggatgaaagtgcggacagccacaaaaacctatacagagaaaaataaagaggaatacgtgcaagaagtcctcggtaaactgtcgaagttcaaacagattaatgatcaagcagaatatgataagagacataagtaagaaacaagaggttttaatcttgttactagagtccatatttaggaggtgaagatgaagaaagaaaagattattaaagataagcacatctttcttgctttagtttgtttgtttatcggctattttggtattcggtattacctgagaccagagtggtttgattcagaacatatctattatagagtaaaaaactataagctaaaaaatataaaaaaacaaaaaaagatcattcggtctatcaatattgaatttttttatcgaaaggatatttccatcccatgggaagcaaactgggttgagtcaactagaaaaaatattgacagaaaattaacgcccatcatgcatgtgactttcacagataatacgaaggctgacatcccaattcaaacttctaatgagggtccagcatttagtgacaatatgttaaaaagtgacttgtaccaaaaactgctctcccgatttcctggtgttcagagtgatcatcaagataaactacttgaaacagtgttgatgatttatccaaatgacactctctaccaggatacgtatatgcaaaaaatagttagttttcaatttgaaaatccaataattaagaccaatcaaacctattataaatatggcgcagaaacacaaaaaagcattttcccaatctgttttgtgcaacagaagactcatcatgcaacatcagatatgacagagtttttggaggatgctgagaaaagagaaaatagaaattatgttgactggttaaactatcttagtgctgaattagacgctcatatagataattatggataccggctttattattcggatgaattctcaaatctaccattaaatttgatgccaactggtaaccagttaaatatgacaatcacttacactatggtagactatggagatgataatggtgtttataaagcttggtccacttcgaaaacttacaccgaatcgaataaagatgaatatattactgaaattttaataccaaatcaaaacaagtccaaatgagtctcatttggacctgtttttacagtaggatgtttaagataggatccgcaaagtcatcatcaaacaaattgatgttagaaaaattataactcttatcaatggcttttggggcgattcttccgatattgaaagtttttttattttcctttatagtggctgttttgggcgtttgtttgattaaatccggtagttcgctaatgattcgtttgtataattggcgaaaatcgtgaccaacctcttgttttaattggctctcccgctcattgattctcctattgagatcctctatatcgggttcagaccagttagaagtaaccgtaaaggaataccctgtagaagtagctgtatccatatgtactttataatcagataaatctcttataaaagttgccatataagcctgttgaatggattctaattctgtttgagtaggggtgtagtatacatttatagatttactcatttcctttgtcttattaagaatactatcttttattttcttattgaattcatcctttactttcttctcaacaatttggtttacatcttctaaattagacggtttatcagcggtggaaaaagtctttcgaagaacagtttgatctgaatcgtttttcttttgtatgtgataagtcagcttatagttggaatgaggttttccgtagaaccataatacagtcttggcttctgacaacaaatcttttttctgaatggtgatttcttgatttttattatccacaagacctatttttttaatagagtaatcctcaagatttttttctgacacagttacataatacatcttgttagatttttgaaaatttgaggtattttgctctttatcaaatacaccattaccgacagtttcaatgctgatagatggacttaaaaagtaaataagaagcaaaattggaattagaatcgaggaaatccatatcagtcttttcttaagttttttactcatacatcctccaatgatagtgtgatgtttaaaaaaggcatctgttaaaaacatcgccataaccgatagcaagttaaatgcagtgcctttattttaacataggtgatccataatagctatcgttttcctggaactcaattgcaagaaaatgctattatttcaaactaaaaaatgattaatttctggattaaaaaatttcatatcaaaatttactttacattttgaaaaaagtgtatgattatggtttaatggaaagtaattatattgttatcaaatcaatttccaaagaggtgacgatgaagaaattaaaacttaaaaagagatatatgatacttagtttggtagcggtcttgacgattgtctacatggggcttcggtattatatcaagccagattggtttgattcagagtttacttattacaaagtctatcaatacaaagttagtaaaattaagccacagaaaaagattatcaaggatattaatattgaaattatccacgatcaaaaagaacaaaaacctacggaagggcaatggcaagaatcaactagaacggacataaagggctataatgactccccaattttacatgtgacctttaccgacaagacgaaggctgatattcccttagtgacaggtcaaattggtcctgcatttagtcagatgaatgtggacagtaaattatatcaaaagctgtcgtatcgctttccacaaatacagcttctaggcgataagcatcgtgatgtactctcaactctgctaatgctttatgagggtgataccttgtttcaaattcctgaggcaaatacggttatacaattccaagtgaaaaatccaaagaacggcaagctccaaacctactatcagtatggtggtgatcctgattttgattatttccgccctgtattctttttacaaacaaaatcgagttcatccaaggaaaaacaagaattctttgatgcttataacccatccactcaaaagaattattgggatagaagttattattctagttacgacaatctatcagtctcacaaaagtatcatttttttaaattgttttattctgatcaattaagcaatcttccactaggagtcagcccgacaggaaatacatttaaaactacgatcacagttacctatattttaccaaatgaaaatcgaaatagtgaaggtgtgagagtagcatcaaaatcaaaaacttacacagatataacagaatatacttcagaaattcttaataaataagtaaaaactccagctagcatactgaactgcaccccaaaagttagacagaaaaaaatctaacttttggggtgtttttattatgaaattaacttatgaagataaagttcagatctatgaacataaaaaacaagggcgaagcttcaaagagctttcaaatcaatttgggataaacatttctaatcttaagtacatgattaaattgattgatcgttatggaatagaaatcgtcaaaaaaggaaagaattgttactattctcccgaactaaaacaagaaatcattgataaagttctgcttgaaagtcgttcacaaataaaggtatctctagattatgctcttccaagtgttggaatgttgcataattggatagcacaatataagaaaaacgggtatactattgttgagaaaacaagaggaaggatacctaaaatgggacgtaagccaaagaagaaacccgaagagatgacagaactagaacgtcttcaagcagaaaatgagtacttgagagcggagaatgcggttctaaaaaagttgagagaactccgattgagggacgaaaaagagcaagaagaaagacggaaattgtccgaggattggtaacagagtttgctttagagattcttctaaagattattaagcttgcccgttcaacttattattatcatttaaaacagctcgatcaaagcgataaggattatgatgttaaagttgaaattcaatctatttttactgagcataaagggaattacggctatcgtcgaatgactcttgaattgaggaatcgtggttttgtagtgaatcataagaaggtccaacgtctgatgaaggtccttggtttaagtgctcgtattcgtcgtaaacggaagtattcttcataccaaggagagattggtaagaaagcagataatcttattcaacgccaatttgaagcaaccaagccaatggaaaagtgctacacagatgtgaccgagtttgccattccagcaagcaatcaaaaactttatttatcgccagttttagatggttttaatagcgaaattatcgcctataatctttcgacttcaccgaatttagaacaagtgaaagctatgttagaccaggcctttactgagaatcattacacaaatacaattcttcatagtgatcaaggatggcagtatcaacaccagtattatcatcgttttttagaggataaaggaattcaaccgtccatgtcacgtaaaggaaacagcccagacaacggcatgatggaatccttctttggcattttgaaatcggaaatgttttatggttacgagaatacatttaagtcacttaaccaattggaacaagctattgtaaactatattgactattacaacaacaaacgaattaaggtaaaactaaaaggacttagtcctgtgcaatacaggactaaatccttaacttaaattatttgtctaactttttggggtcagtacatactagttggagtttgttttttattatactatgagatcttcgagaggatctgtcattttcctgaaattataggtatctacagtaggaatttcagaagcgaaatcatctcgttcgatttgtaaagttactttttcttccgttttcttcaaccttggcatttctttgatcattgttggtagttcagaaataattgtttggtaaacttttttgggatcatttttgaactcattttttaattgagtttctcgttggtcgatgattttattcagtgcatccatatcaggagcagaccattgaaaatccatttcaaattcataggaggaatcattggcggctgatagtttaaattgtgacttttcaaaccaatctttgataatagtatcccaatatgcatctgcaatggcttcttgctctttttctgatggagtataataaatgtccatgtactcccaattatctttaagattttgaatcagccggtctctgatgtttttctccaccctcttttttaataatttttgaccaaccttattgacctctgagaagttggaattgttagaaggagtattgaaattagactcagctttggtatccgaataaatatcagtgtaaactaacttgtattttttgtccggcttaccggcaaaccagaagccatatttatcatcttgtttatcctctaattctaagatggcttgtttgttattattctgatctaaaattttaagttcattactagatatagagtgaacggcatcaattgaaaactcgacgtaataacgattttcagcctctttgtaattttttgctggatgtttagcgtccatatagccatttatttcagactttatagaaacatgaggactaaactcaaaaagagtaggtatgggatagaaattaaaaaatgtaatgagcccaataacgattgaaatagcagcaatgattaagattttctttatcttcatatcgcctccttacttatcaaacttcacttcctcaagcaagtactcgatgaatttttctcccatttttgagagggctgttttttcatgtttgatgtagaccagctcgatcgggtcttcgatatcaaggggaatggagacgatgttattcccgttgagattgctgttgaggatcccggtcgcaatggtgtagccatccagaccaatcaagagattaaagagggtcgcgcggtcactgacgacgatggatttcttatgatgctcttgagagaggatctcttctgagaagtagaaggagttgtgggtcccttggtcatagctaaggtatgggaaatcttccagatctgacaagtgaacgatctctttcttggcaagaggattggtcttgctgacaaagatatgaggttgcgctgtaaagaggtgggtggcaatcaggtgattatcatccagcatcttagagaggacatctcggttgtagctattcaaaaagagtacgccaacctcgcttcggaaattcttgacgtcatcgatgatctcccaagtccgcgtctcccgtaggaagagctcgtatttttccatgtcgcttttcttcaatagtgaaacgaaggcctcaaccacgaaggcgtagtgctgtgaagagacgctgaaaagctcacgagagcccacaggatttttatatcgctcggacaagaggtcgatctgctccaccacctggcgggcataagagaggaactccatcccatcgcgggtcaaagtgatccctttaggattccggataaagatttcaatccccatctcattttccaagtccttaacggcattggaaaggctaggttgcgtgatgaagagttgttttgcggcctcattcatagagccggtttcgacgattttgataatgtattgtaattgttgtattctcatgcttttattttaacataaaaaagcgcgtttttcccgtaaaatgtggtctttcaaggactgtatcagagaataagacaggctgagggaggtaataggaagtaggctagatcaaacatttaaaaaatagaaaattggaaacaaaatctccatctggggactgattttgatggaaaaatacagttttgccttgattaaggggtgagctgattgatagaatggtaaaaaattgattgaggagatcttatgaaaaaactagtgtcctggtataagaaaaaggataaggaattggaaacccatttcacatccggtctgttgcagatcaattttgtgaccaatgcactgattctattagccttttacatctattttgttgttagtgagtcgatctatgcaataaaggatccattcattcaatttagttttcttgctatagtgtcctttacgatggaggttttgccctatggtgtgaccttagccctctttgtccccaatatttttgttatcatttatgggatcggtcggtggtctagcctccagtacaaagaagctgaggaagaagctctcgaagatccggatttgtttgaagatagggtgccgaaggaaggagaagggacaagagaagatgacgcatctcttatgaaggaaaagcaagaatcacctaatcctaagcctgtcaaaaagaaaaagcaacagcctaccattgtactttggtttggtctctttggttgctttctcgaagcgattttcatttacatcgtcaaggagatgaccttttacgattggagtgagagtttggtcaattctcagaagcatgccctgatctggtctggcgcctatccgaccttcttcacactggcagctcttactttactagccttgattatctattcctaccgggatgcgaattcactctcgccgttagcaaatgtcttctgcatcagtggcattctaggaggagtggttctcctcttagtttttgataatcaactgcaggtagcaagttttcacacctttttcttactgatctattccatccatctcttatgggttcgcatcaaggagtggcaggaagatcgaacagagataagctatgagaatcgtctgcttcaatggctccatcagctcttaaacaagtcgcgtaactggccatggctagcagttcttgttgcccttccaacccttgctctcgttgtcctcgttctcatgctctttgggcagcaaccggattccatgatcaaggcctggaccaatacagctgactgggccttctcacagaagatccctcctcagaatctcatcattgatgagcactatctctgtacggttgcggctggtggtcatgaaaatgttgtcaagccccagcggatgggtgtccgccagggtcatccagtcgttgtcaatcgccagctttgtattgccaatgcctttgaacaggtgctagaagaaaagacgccacgtttccatcgcttcttgcgtcgcaattatgaccgctatggttatccctttgccaaacatatcaagaagaaatgggctatggacctgatctattacctgatgaaaccgttggaatggctctttttactggttctttatctagttgatcgcaagcctgaaaaccgaatcgccatgcaatacatcaaaccgatcccagaagatttcgaccctcgtaaagcatcctgagttactgattttacttgacaagcgagaaggagcgcgatataatgagacaaatttaacctttaagaggtccagagaggcctgcaaggaaagacagaaaaaagatcagcagactgtgtctagctgatcatttgtagggccttgcttttgcgaggtcttttttgctgatagaaagaagaggatatcaatggtcagtgacagttgtaaaaaacgctttggcaaaatcatgatggaggagatggagctagtcgctcaagaagagattgctccccgcatctattctatgatattaaaaggagaaatggtggcgcagatgctaccaggtcaattccttcatatccgcgtccctgatgggtccaagctccttcgccgtccgatttcaatttctgagattgatcctgagacacagacgtgtcgcttgatctaccgcatcgaaggtggggggacagctatcttttcccagttgccaatcggtagcaaactcagtgtcatggggcctcagggaaatggctttgacctcaccaatctcggccaaggtcagaaagccttgatcatcggtggcgggattggtgttcctcctttggtccaagtggccaaacaactccatgagcaaggcgtggaagttgaagtggttgtcggctttgcgaccaaagaagctgtcattttggaagaagaactttctcaggtggctcatgtcactgtaacgacagacgatgggacttatggcactaagggctatgtttctacggtcattgatcagatggaccaggagtttgacgctatctattcttgtggggcacctggcatgctcaaatatgtcaataccaaattccatgaccatccccgcgcctacatttctatggaatcgcgtatggcttgtgggatgggtgcttgctacgcctgtgtagtgcatctggaaaatgaaagccaagcggccaataagcgcgtgtgtgaagacggaccggtctttgaaaccggtacgattgtgatgtaggaggaccttatgacagaaaatcgactagccgtatccttacctggtttagacttgaaaaatccgattattccggcatctggctgttttggcttcggtcaggaatatgccaaatactatgacttagacctgcttggatccatcatgatcaaggcgacaactgctgaggctcgttttggtaatccaacgccccgtgtcgctgagacgcctgccggcatgctcaatgccattgggctccaaaatccaggcatagacgtggtcctggcggaaaaactcccttggttggcccagcattatccagatctaccgattatcgccaacgtagcaggcttctccaatgaagagtatgcaacggtatctaggaagatctcgcaagcaccaaatgtcaaggccattgagctcaatatctcttgtccaaacgtagaccatgggaacaacggcctcttaatcgggcaggttcctgagttggcctatgcggctgtgaaagcagcggtagaagcgtcctccgtccctgtctatgtcaagttaacgcctagcgtggcagacatcacgcaggtcgcaaaagcagcagaagatgcaggggcgactggcttaaccatgatcaataccttggtcggaatgcgctttgacctcaagactggtaagcccatcatcgccaatggaaccggaggcatgtcgggtccagccgttttcccagttgctttgaaactcatccgtcaggttgcccaatccactaaacttccgattatcggaatgggaggtgtcgattcagccgaagcagccattgaaatgatgattgcaggggcctctgcgattggagttggaaccgctaattttaccgatccttatgcttgtccaaccatcatcgaagatctgccacaggtcatggatcgctatggtattgacacacttgagaacttccgaaaacatgtacgggaaaatctactgtaaatccttgacttttcccaaatatcgtactacaataaataaaaacctttaaagtagtccagagaggctcctaaggtctagacggtgaatcacggtagttgttcctacctaattttcgtgtaaccttgcctcgggcaaggtttttttgtagataaaatgatcaatcaaaaaaaggagtaatccatgcgtgaagaacgtcctattatcgcccttgacttcccagctttcgatgatgtcaaaaactttttagagcattttccagaagacgaaaaattatttgtaaaaatcggaatggaatttttctatgcagttggtcctgaaattgtacattacctcaaagggcttggacacagtattttccttgatttaaaattgcatgatatcccaaatacagtcaaatcagccatgtccgtactggggactttcggagtagatatggtgacggtccacgcagccggtggtgtagagatgatgcgcgaagccaaggcagctcttggtgaaggagctaaattggtagccgtgacccagttgacttctaccagtgaggaagacatgcgtgattgccaaaacatccaaacaacggtccaagaatctgtagttaattacgctcgcaaggcgcaagaagcaggcttggatggcgttgtttgttcagcccatgaagtagctttgatcaaggatgccacttcatcagactttgtctgtgtcacaccagggattcgaccagcaggagctgaaattggtgaccaaaaacgggttatgacgccacaagaagctcataaaattggatctgactatattgttgttggacgtccaattattcaagcagaaaacccatgggatgcttaccatgaaattaagagacagtggaatagttaagaacgtctaagaagctgtgcttcaagacgttctacgggaagcccgatagggccttccctaaactattcactagatttagaggataaaaataatcgttttatcctctaaatcgtcggaacactaatcgctactaaaagtgaaacttttgtagctctacgggaagtcctatgggaccttccctaacacattcactagattacagaagagaaaatgatcgtttctcttctgtgatcgtcggaataataatcgccagtaaaagtggaacttttgtagttctacgggaagtcggatgggatcttccctaacgcgttaactaacctgtaatgttgttgtttaaatcaataattgatttaattcgtatatgattaaaatcgtaaaaaggagtcgtcatgtcattagctaaagatattgctagccatcttttgaaaattgaagcggtttatttaaaacctgaagaacctttcacttgggcatctgggatcaagtcccctatttatacagataaccgtgtaaccctcgcttatccagaaactcgtaccttgatcgaaaatggatttgtagataaaatcaaggaagctttccctgaagtagaagtgattgcaggtacagcaactgcaggaattcctcacggagccattattgcggacaagatgaatttgccatttgcctacatccgtagcaaaccaaaagaccacggtgctggaaaccaaatcgaaggccgtgtaccacaaggtcaaaagatggtcgtagtggaagatttgatttctactggtggttctgttttggatgctgtcgcagctgccaagcgtgaaggagcggacgttcttggtgtggtagccatcttcacctaccaattggagaaagccgataagaaatttgcggaggctggcgttcaacttgaaaccttgtctaactatacagaattgattcatttggcagaagaacaaggttacatcacttctgaaggtttagagttgttgcaccgttttaaggaaaaccaagaaacttggcaaaattaataaaacaactgaagcgtttttaacgcttcttttttatactcttttcactagttggtggttaacttgattctcaaagtaaaatccggtatgatagtagtaattgtttttatggatgaagggaaaactatttttaagggagaataagatgacaaaagaacattatttgcaaatgaagaagcaggctcgtgtctggtttaccgttaatatcgtcatcagtttgatcgctattgcaggaggaattttagtggtcattagtaaatcacgtcatattccatttttactgatggccttgggggcactgactttgatgaaccaagtcttggttacccctgctttcaacgccaaaaaagaagctgaggaagaacatccagaatggaagagcttgtctactaaagatactaaaataactgcggagaatctgcaaaaaggttttttggtatcagctacggctcttctgattgtcattattggtttcttcatgttctatcgtcctcttccgacaacagacgcaggaactgaagtgatcaaaacctatcgcgagatccagtctgtgccagaaaattcaacagaaaaaggatctagcacagtctctaatttaactccgaaagatgttcaaaccttacaagaattgaaggaagagatcgaatctaacgccccttcggattcaaactcactagatataaacaaagcaaaagatcttgcagaaaaagcgcagcaacagaattggttgaaaaggggagaataaaaattttttcaagggatttgaaaccaactagtttatgtgaaaaggtaaaaaattaatgacagtaacaatattctggcttagtttgggcattctgacacttattttcctgatcattctgctcatcttttacaccttgtatcgtcgtgaaataaaagtgaaaacagaatctaccgcaaaagttatgggagaagtagttgcttttgattccaaaaatcaactgcttatttctctgcctgtggtagagtatcaagtcgagggtgaaagataccagaagaactttacctacgcttattttagggagacttcttccaaatctaggcaggccaatgttttcgatagaacctatgttcttggagccggcaaaaatctggatttgcggatgatattcccaatcgggtctcccatgacagtcttttataatccagtcgacccacagatcggttttgtcgaacgatatgccggcttagtcggtttctataaaatcggaatgattctaacagttggaatttatcttgtattattatgtattttaatactagtattttaggtctgttagttaaggttgagagttaaaaattgcttcgataaaatgagtatgtttataaattacattttagaacaacttttctttgcactttacagttgatagtcagtccaaaacagcagaaatgctgtttttttgatataatggacctatgttatcgaaaagtaaacgtattctatttgggatgcttcatgttgtcatgttgctggtgatggtccactggttcttgatcagtgtgacctatctgagagaaatttcatggctagccattttaggtgctggattgttatttctgctagcctggctgaaacgagatgggctaaagagtgcctttgcttggttgacccggcacaaaaaaggcttcttgattggatcggttgtctttcagttgatcgtcatggtctgtgcggagctctttatccgtcgggatgccgcggttgttttcaaaggggcttttgatcttcttaagcaatcctctatcaccaactacctcagtcgcaatcccaataacattccgctctttctttatgagaagtttttctatgtcttatttggctctagcggtctgtgggtcatgcaggctctcaatatcctctatgtcaatctgggtgcagtcctcttatacaagctgtcccagaagcatttcaatcaaaaaacggctgatctggtctatctcttctatgtgagcttgatctgttactcgccgtatttctattccatgtacacggacattccgccgcttcctttgatcgctcttcagttatggtgggccttggatctcttgaaggaagatcaagcagtctcctggaagaagattgttggcttggggatcttatctggcgtgactatgttgatccgtccaacgacgattattgtcatgattgccttttgggctgtgctctttttcagaggaaattggaaggcctttggaaagattgctacggtgacagtcatgacgacaggctttgtctttgcaggattgaatacagcggtcaatcatcaaagagttgtgccgatcttgaaacaagaagggctggctaaaggaccgctcttgtttatcaatctgggcttgacagatatggggcacaaccaagaagatatgaaagaaggcttgttggcctatatcgatgaggataagcgctcggattacaacaatggcctctttaaaaaagaaaatgtgatcaaagaaatcaagcgccgtctcaaggagtacggaccgttcggtttgatcggtcatatctactacaagcaatccttgacggtagcagaaggaacccttggctggctgtaccgagatgtagagtatgagaagacgcctttgattaaccctctctatgcacccctgactaaaaataatggtctggcaaaatgggtgcggacctatttccttagcattgatcgcccgcaatacaagtattatgaatttgtgaagcaggtgatctggatcgttctatcggctggtttggttggggcttatctcaaacgtcgagatacagatgactttaacttcctttccttagcagtctttggtggtttgctcttcttgaccatctttgaaggtgggaagacccgctacctcatccaattcttaccgcaaattttactagtcgcttcgatcggtctagcaggatttaccaagaaagaaaatacataaaagctctggcttgtttgacaggcagaaaaagagagtgggacagaaatcggtaattcgttagaattcgatttcgtcgttccacctccgcgcagttgagtagggctgtaaaagctgatgaaatcagcgtagtagagcccactcaaccactgcgtcttgctcgacaatccaaaaataattgagaggctaggacttttgtcccagcctcttttttatccagtggatctgcgccaaatgtggtataatggaaggtaagaatttattggatagcggagagtttccatgcagcattcaccctggcatgaagccatcaaatcccatcttccagaagggtattttcaccagatcaatgactttatgaatgaagtctatagcaaaggagtggtttatccaccgcgtgacaaggtctttaaggccttgcagacgacagagatggatcaggtcaaggtcttgatcttaggccaagatccctaccatggaccggatcaagcgcagggcttaagtttttctgttccggatcatgtaccagcgccgccttctttgcaaaatattctcaaagaattgcgctcagatattggagagaagcggtcccatgatctgacctcttgggcggagcaaggggtgctcttgctcaatgcctgtttgacggttccagctggtcaggctaatggccatgctggtcaaatttgggaacctttcacagatgctgtgatcaaggtggtcaatgagttggaggagcctgttgtctttatcctctggggatcttatgcccgtaagaaaaagcctctgattacccacgatcgacatttggtccttgaatcagctcacccaagtcccttattggcctaccgaggattctttggttcccaacccttttcaaaaaccaatcaatttttgaaagagacgggacgcgagccgattgattggttaagataggagaaagaaatgccacaattagcaacgatttgttacattgacaatgggaaagaatttctcatgctgcatcgtaataaaaagcccaatgatgtccatgaaggtaaatggatcggagttggaggaaaattagaacgcggggaaaccccacaggagtgtgctgcgcgtgagatttttgaggagacgggccttagagccaagccagtcttaaaagggatcattacctttcccgagtttactccagatttggactggtacacctatgtcttcaaggtaacagattttgagggagaactgatcgagtgtaacgaagggaccttggagtgggtaccttatgatcaagtcctctcaaaaccaacctgggaaggggaccacacctttgtcgagtggttgttggaggataaacccttcttttcagcaatgtttcgctatgacggcgaccgcttgttagagtcgcatgttgatttttatgaataaaggagaatgcaatggttgtcattaaaaatggtcgcgtaatggatcccaaaactggcttggatcaagtctgtgatcttcgcattgaaggaaagaaaattgtagagatcgctgaaaacctcccaacggatggacaagaagtccttgatgctactggtctggttgtggcacctggtttgatcgatgtacacgtgcatttccgcgaacccggtcaaactcataaagaagacatccatacgggtgccttagccgcagctgctggtggttttactcgagtggtcatgatggccaataccaatccgaccatttcagatattgctaccttagaggaagtcttagcttctgcagccaaggaaaatcttcacattcatacggttgcgacagtgactaagaactttgacggtcaacacctgacagattttgaaggactgcttaaggctggtgcagtaggattttcagatgatgggattccccttcaaagcacaaaggttgtccgtgaagctttggaagaagctaagcgtctagggacctttattagtcttcatgaagaagaccctgagttgaatggcattctcggtttgaatgaaaacattgccagggagcacttccatgtctgtggggcgacgggtgtagccgaatattcaatggctgcgcgggatgccatgattgcccatgcgacaggtgctcacctccatatccaacacctttccaaggaagaaagtgtcaaggtggtggaatttgcccaaggattaggagctcatgtaacggcagaagtggcacctcaacacttttcgaaaacagaaagtctgctcttgactaagggaagcaatgctaagatgaatccaccccttcgcttggaatctgaccgtctagcagtgattgaaggcttgaaatcaggcgttatctctgtgattgcgactgaccacgcacctcaccatgcggatgagaagaatgttcctgatattaccaaagcaccatctggcatgactgggcttgaaacttcgctctctcttggtttgacctacttggtgcatgcaggccatttaagcctgatgcaattgcttgaaaagatgtcctataatccagcacgtctttatgattttgatgctggttatattgcagtggatggaccggcagatttgaccatctttgatccagaagcagatcgtctggtatcggatcatttcgcttcaaaagcgggcaattcaccatttgtgggcgaaacattaaaagggaaagttgcttatacaatctgtgatggacaagtgatttttcaaggataagcgatcgtattcatatgaatcttaaaaaaatgatgcaaggcttggttttctttttaaccagccttcttgtctttgtctttctatttcgtgctctgctaccaactgcgtctcctcgcatgaccaagcccaaaacggctgcgaaagaaatcacatatacttatgtagctctaggtgattcactgaccgaaggagtaggggatagcaccaagcaagggggatttgtccccatccttgcccaaagtctgtccaatgaaaatgacggccagtatcagcctgtcaactatggagtagctggaaatacaagcgctcagatcttagatcgactcaagaagcaaacaggtcttcagaaggatctcaagaaggcgcgtgtcatgaccttaacggttggaggaaatgatctgcgcaaagttgttgtcgatcatctgagtgatttttctctatcagatatccaaaaaccgctcaagaattatacagcgaacctcaaagaaattattacaaaggccagaaaggacaatccccatcttcccatttatgtagtggggatctacaatcctctttacctgaattttcctgaattaactagtatccagacggctgtagatcgttggaatgagacgacggaagaaaccatcgcgcaatttgatcaggtctatttcgttccgatcaatgatgccctgtataaaggaatcgacgggaaaatgggtgtgtcagaagtcagtgatggcaaagcgacgattacaaacgatgccctgtatgaagaggatcgttttcaccccaacaacacaggttatgaaaagatgaaacaattaatattggagaaaatcaatgcgactaagaaaacttggagtcaaaaataatcccattaaagagaaggtccccttccttcaaaaaatcaatatttggaaatggttatttttaggtttagtcagccttctcttagccttcgctatagtcgtgcaaggacgcttagcgacgccaagggaagatgtcagtcagcttcatcaagcagttggcaccaaagatgtcaaagttggaactatgacgacgactcgtgatcaactcaatgataccatcaaatcgcttctgaaaaaatataagctgtccgactacaaggtctatgcggacaatcagcaaatcctattagaaggacagttgagtatcttggggaaggattatcccttatatatttactttcaaccatccaaattggaaaacgggaacatcctcttgacggtgaaggatttttcagtcggaacttttcaaattccacaaaggatggttttgcagcttttgagcaagaataaaaatatcccaaaatttgttcagatctcacccaagcagtctaccatcaccattgtattaccagaaattgacaatgattttggaatctatgtcaaggccaataccattgatctctataatgacaagatcgtttttgatttgtatcagaagaagtagagtaacagactctattcagattgatggaaaattgtattttacataaaacaactagaatgatgctgaaaataaaaacgatagttactattaggcttattcaataaatattgaaactttccgccgtgagaaaagtgctagaaacacttttgtttctagcactcggaattattgagaccttaggctcaataattagtcatggaacttctttgaagttcgctgacgtccgtcttcacctaaggaaagtttctaagatgactttatcttcaatctaactagaactgaaagctctattttgtttctattcaaaaaattcagaatattacggaaaattcttgacattgctttttccctatgctaaaatactaagcaagacattgaactaaggagaaagtcaaacatgaaaacagctaagtttattcaatttgctttgttgttgaggtataagggctagtgcagaagcattagtcctgtttggcttaccaagcgggcaaaaacatctcgcttggttaaccgagtgagatgtttttctttatatccactacatagaaatgaggagaccctatgcgtaaagttgaatttttagataccagccttcgggatggtgaacagactccgggagttaatttctctatcaaagaaaaaattgccatcgctaaacaattggaaaagtggggcatttctgctattgaagcaggttttcctgcagctagtcctgattccttcacagctgttcaagagattgccaaggtcttgaccaagacagccgtgacaggtttggctcgctccgttaaatccgatatcgatgcttgctatgaagccttgaaagacgccaagtatccgcaagttcacgtctttatcgcaacgagtcccattcaccgggagtttaaactcaacaagaccaaggaagaaatccttgaagccatcaaagagcacgtttcttacgctcgctcaaaatttgagattgtggaattctctcccgaagatgcgacccggacagaattggatttcctcttgcaagttgtacagactgcagtcgatgctggtgctagctacatcaatattcctgatacagtcggtttcacgacaccagcagagtacggtgccattttcaaatacttgattgaccatgtcaagacagaccgagagattatctattcccctcattgccatgatgacctaggtatggccgtggccaatagcctcgctgctgttaaaaatggtgcccgtcgtgtcgaaggaaccatcaatggcatcggggagcgggccggcaatgcggcgcttgaagaagtagcagttgctctcaatattcgcgaagactatttccaagtggagagtccgattgtcctcaatgaaaccatcaacacttctgagttggtctctcgttactctggtattccaattcctaaaaacaaggcggttgttggtggcaatgccttctcacacgagtctgggatccaccaagacggagttcttaaaaatcctcttacctacgaaatcattacccctgagttggtgggtgttaagagcaatagtctccctcttggaaaattgtctggtcgccatgcctttgtcgaaaaactgcatgagttgggactggaatttacagaagaagacatcaagccattgtttgcgaagttcaaatctctggcagacaagaaacacgaaatcacagatgccgatatccgcgcccttgttgccggtacagcagtggaaaatccagaaggattccaatttaacgatctccgcttgacaaccaatgcagacgaaacgattacatcagcggttagcctccgaaatgaagaaggggaagtgcttgagttccttgccaatggtcaagggtcggttgaagcgatctttaatgcgattgataaattcttcaaccaaactgttcgcttgacatcttataatatcgatgcagtgactgatgggatcgatgcccaagcccgtgtcttggtatccgtggaaaatgtcgatacagatacgattttcaatgcttctggtttggacttcgacgtattgaaagcctctgccatcgcttatatcaatgccaacacgctggttcaaaaagagaatgcgggtgagatgggacgagctgtctcctaccgcgaccttccacaagcctaagaggaaataaacatgacaaagaaaattgtaacacttgcaggagatgggattggccctgagatcatggcagctggactagaggtcctcgcagccgttgctcccaaaatcggctttgattatagtctagaagacaaaccttttgggggtgctgggattgatgccgctggccacccacttccccaagatactctaaaagcagctaaaggagcggatgctattcttctcgcggctatcgggagtcctgagtatgacaatgctcctgttcgtccagaacaaggcctgctcgctattcgcaaggaattaaatctctttgcaaatattcgtcctgtacggatttttgatgctttgaaacacttgtctcctttgaaaccagagcgtatcgagggtgtcgactttgtggtcgtacgtgaattgacaggtgggatttacttcggagaccatatcttaaaagaagatacagcacgcgatatcaatgattacagtacagaagaaatccgtcggattatgcgccaagccttcaagatcgcgcaaggacgtggtaagaaagtgaccagtatcgataagcaaaatgtccttgcaacttctaaattgtggcgccaagtggcagaagaagtggctaaagaatttccagatgtgaccttagagcaccagcttgtcgatagtgcggccatgatcatgattaccaatccagcccgctttgatgttgtagtgacagagaatctattcggagatatcttatctgatgaatccagcgtccttccaggaacactaggcgtgatgccatctgctagtcattctgaccaaggaccaagtatgtacgaaccgattcatggttcagcacctgatattgcaggtcaaggcattgccaatccgatttccatgattctgtccgttgccatgatgctccgagacagttttggagaaacagcaggtgcagaaatgatcgaagaagctgtcaatcaaaccttgaatcaaggaatcttgacgcgagatctaggtggtcaggcttctactgctgagatgactgcagccattattgggaatctctaagatgacttggagagatcgctgtttagttgttattgctatttggaatagtatcgtatttctgacctatggtttagataaacgaaaagctatccaaaacaggtggcggattcctgaaaaggtcctgttacttgagagctggctgcttggtggatttggagctctactaggtggatatctttttcaccacaaggtgcggaaatggtattttcaagccacctggtggggcagtagccttcttttagcaggtgtcctctttctaatccttcaatggatttcctaacaagaagataaatggagaaagacgatgagtggaaaatctatctttgataaactttgggaccgccacgtgattacaggagtggaagggcaaccccaactcatgtatgtggaccaacactacatccacgaagtgacgagtccgcaagcctttcaaggattacgggatgcaggacgcaaggttcgacgacccgatttaacctttggaacctttgatcacaatgttccaacggtcaatatttttgatattcgagatgtgatttcaaaagcccagattgataaattagctgagaatgtggtggactttgggattgatcatgctgcccatggttctgctaagcaaggaatcgttcatatggtgggccctgaaaccggtcggacccagcctgggaaatttattgtctgtggagacagccataccgccacccacggagccttcggtgccatcgcctttgggattggaaccagtgaagtggagcatgtctttgctacccaaaccatttggcaagtcaaaccaaagaaaatgttggttgaattcaccggaaccccacaaaaagggatctattcaaaggattacatcctagctttgatcgcgcgctacggtgttgcttgtggagttggctacgttgtagagtatcggggagaagcaattgatcgcttgaccatggaagaacgcatgaccatctgtaacatgtcgatcgagttcgggtccaaaatggggatcatgaatccagatgagacgacctttgactacctccgaggacgtgaatgtgtgccagatgattttgaggccgcagaagctgattggaagactctggttagtgatgacgacgccgtttatgataaggtcatccgtatggatgtatctgatcttgctccgatggtgacttgggggaccaatccttctatgggagtggacttcgagactccttttccagagattcgcgacatgaatgatgaacgggcttatcattatatggatctagaacctggccaaaaaccagcagacattgaactaggctatatctttatcggttcttgtaccaatgcgcgtctcagcgatttggagttggcagccaagtttgtgaaaggcaaaaaaattgcgccaaacttaactgctattgtggtacctggatctcgtccggtaaagcaagccgccgaaaaattaggcttagacaagatcttcatggatgcgggctttgaatggcgtgatccaggatgctccatgtgtctaggaatgaatccggacaaggtgccggatggagtccactgtgcctctactagcaaccggaactttgaagaccgccaaggatttggggctaaaacccatctctgtagcccagcaatggccgctgcagcagcaatcgctggtcgctttgtcgacgtgcgccaaatgccagaagtcgagtaataggaggaagcatggagaaatttaccatttatacggggaccacagttcccttgatgaacgataatatcgatactgaccagatcctccccaagcaattcttaaagctgattgataaaaaaggttttgggaaatacctcatgtatgcttggcgctatttggatgaccagtataccgaggatccagattttatctttaacaagccagaataccgcaaggcaaccattttgatcactggtgacaattttggggctggttcctctcgggagcacgcagcctgggctttagctgattatggctttaaagtcgttatcgccggatctttcggagatatccattacaataatgagcttaataatggcatgctgccgattgttcaaccgctagaggttcgtcaacaattggcaagtttgaagccaacagatgaggtaacagtggatttggaagagcagaagatcatctcgcctgttggagaatttcgctttgagatcgatcaagattggaagcacaaattgctcaacggcttggatgatatcgggattacgcttcagtacgaagacttgatcgcagcttatgagaagaatcggccagcttactggcaatgataaaattgtatacttaattacgaattttctgaaaatatattgaatttgagattattttttgatacaatactaaaaagaatagaaaaggaaagagacttatgacaagacacattcaatgggacggacaactttcacaagaaggatttgatattcttaaaggagaagggggctgtatcgtctgccctactaaagttggctacatcatcatgaccagtgacaaggctggcttggaacggaagttcgaagccaaagaacgcaaccgcaacaaaccaggtgtggttctttgcggaagcatggatgaacttcgtgcccttgcacaattgaatcctgaaatcgaaggcttctaccaaaaacattgggatgaagatatcttgcttggttgtatccttccttggcgtgaagatgcttatgcaaaattgcaggctttcggagatggacgtgaagaactcatgacagacgttcgtggaacttcatgctttgtcatcaaatttggtaaagctggtgagcaaatcgccaaagaaatgtgggaaaaagaaggcaagatggtttacgcttcttcagccaacccttccggtaaaggaaaccgcgggaaggtcgaaggaatcggtgagcgcatcgaaggtgccgttgacttggtcattgaagccgatgattatgtagcttctatccaaccagacaagaccattgaaactcgttatgaacaaggtgtgatggtttctatggttgatgcggaaggaaaattgattccagaacaaggagcaggtagccgttctgtcaatacgtgtccagttgtgatccgtaaaggattggatatcgataagattatgatgcacttatctgatcatttcaactcttggaactaccgtcaaggggaatactattaagaaacagaaaaaagcattccatttgggatgctttttttgtgaaaggataaaagatggtataatagaggcaaacgatgttctaatagaaggggaagtggtatgatctccagaaaagcgtttatcgataaatccaatcaggaaggtttttccttcaacatccaaatcccatggtggaggtacaataacttcaagtcattggtttggaaaagaaggctctctgaggaacaactctatcagatctttcttttactttgtagagaggtagaagaccggcaaatgcaggtagtagaggataagaggaagtatcagaccggattttatgtagtggcatgtaatggccacgagtttcgctttgagtttgcttttaaaaagaaccaagaactaagagtttataatttatttgagaccatcaatggtcgtaagaaactcaccttgatggatctgcttgattacataatggattgactatgtatagaaacaataaagattcactacagattgataaaagaaagagtggttctatgatttcaagagatgcatttttagaaagaatcagccaagagggattttcatttagtattgacatcccgcgcagaaatttttcggattttacatcattagttcggagaagaagaatttcagaagaagacctctaccagctgttttataactattgtcaagaactagaaaactgtttgaaagaagcaggggagaaacgacgcttgctcttcaataagtttccagttagccccgttcatgataaatataaaacgaaatatgatacagtggcacccaacggacgcgaattccgctttgagtttgtatttagcaatgacaatcgtttaaaagtttatcatcttattgaaacggttaatggtcgtaggaaaaaaacacctatggaaatactgacggacttagtcgatgccttataatgaagatctgttcaaaagtataagggggatccaatcaaaaaaactagagtatgcgctctagttttttggttgttgatgggtgatgttctttccccaagggatgagattttcttttttctctttgatccgttggatattgtccttgtgacgaagaataatcaaggtcgctaaggccaagacaatgattgtaaaaagtggatcatatttgtgcaagatccatccagtcaaagggagaaggaggaccgatagaatggcgagtagcgcaacagtaacactcgaaaacgaaatcatgctggttaaatacaggctggctacaaaataaacagctaaaatgagcagcaggataggcgagaaaccaagtaagacaccagcactcgtcgccaccgcttttccacccttaaatccagcaaaaattgggaaagtgtgccccaaaacagctaagagaccaaagaccatcggcgagatcccctgaattccaaagaaagtcggaaggagaactgccaaagttcctttcaagaaatcaatcacaaagacgatgatcccagctttcttccctaaaattcgaaaggtattggtcgttccagtattgcccgagccatgttcccgtaaattaatatggaaaaagattttcccaatccataatcccgaaggaatggagcctaacagataggctaaaattaaaacacttatttcttttatcatactctcattatatcaaaaagccatcgatagaaaaagcaatttctggagttcaagtgtgacatctgaagaaagtgtccagccagctttttttactaagatgtagaaatctccatataaagagaaaaaattttgcaaaatttcctaaaaaactgtaatatagaaaagatgaacaaacaggaggttccttgtggcaaaaaaggaaatcaatattaataattataatgacgatgccattcaggtactagaagggttggatgcggtccgaaaacgtccagggatgtatatcggatcgaccgatggaaatggcttgcatcacatggtctgggagatcgtggataatgcggtcgatgaagccttgtctggctttggatcacaaatcgatgtaacgattaataaagatggttcgctatcagtagaagaccagggacgtggaatgccgaccgggatgcatgctatgggtaaaccaaccgttgaggtgatctttacggtcctccacgccggagggaagtttggccaaggaggctataagacatctggaggtcttcacggagtgggatcttctgtcgtcaatgccctttctagctggctagaggtagaaattacccgtgatgaagctgtctacaagcaacgttttgaagatgggggaaaaccagttacaacactcgagaagattggctctgctcccaagtctaagacagggaccaaggtcaccttcatgccagatccaaccatcttttcaacgacggatttcaaattcaataccattgctgagcgaatcaaagaatcagccttcttgctgaaggacgtgacgttgacgctgaccgatctccgcaaggaagaagataaccatgtggcctttcactatgaaaatggtgtccaagatttcgtagagtacttgaacgaggacaaggaaactttgacaccggttctctactttagtggcgaatcagatggatttcaggtagaggtggccatgcaatacaatgatggctactcagataatatcttgtccttcgttaataatgtccgcaccaaagatgggggaacccacgagacgggtctgaagacagccatcactaaggctatgaacgactatgcaagaaagacaggactcctcaaagaaaaagacaagaatctggaaggatcagactaccgtgaaggtttgtctgctgttctctcgatcctggttccagaggcccatttgcagtttgaaggacaaaccaaagacaaattaggaagccccttggctcgtccagtcgtcgatagcattgtttctgataaattgaccttcttccttatggaaaatggggagttggcttctaatctcattcgtaaggctattaaagcccgggatgcgcgtgaagccgctcgtaaagcccgggatgaaagccgaaatggcaagaagagcaaaaaagacaaaggacttttatctggtaaattgacaccagcccagtctaaaaatcctaagaaaaacgaactctatctagtcgaaggagattcagccggtggttcggctaagcaaggtcgagaccggaaattccaagcgattcttccccttcgtgggaaggttcttaatactgagaaggccaatatgagtgatatcctcaaaaacgaggaaatcaacaccatgatctacaccatcggtgcaggagttggggcagatttctctgtggaagatgccaactacgataagatcattatcatgaccgatgcggatacagatggtgcccacattcaaacccttctcttaaccttcttctatcgctatatgcgacctttggtagaagctggacatgtctacatcgcgcttcctcctctttataagatgtccaaaggcaaaggcaagaaagaagaagtggcctatgcttggacagatagcgaattagaggagttgcgtcggacctttggccgtggagcaaccctccaacgttacaaagggttgggggaaatgaatgcggatcagctttgggaaaccaccatgaacccagagacccgtaccttgatccgtgtcaccattgatgatctagctcgtgcagaacgccgtgtctccgtcctaatgggagataaggctgcaccacgtcgtcaatggattgaagacaatgttaagtttaccttggaagaaaatacggtattttaatcactttctactataaagtaaataagctgggatgtagaaatggtaaggaatcgacatgagaactgatacagaaatgatgaatctaattttgcaaatagctgatactctagaagtagaagcaattgctttatccggatcacgaacgaatcctcaggtccccaaagatgagtttcaagattatgatgtggtctatattgttgagaatctgaacgacttgttatctgatttatcttggctagaccagtttggaatgcgtctgattgaacagcacaatgtccttggacaccgtcgtctgtatctcatgctttttgaagatgggaatcgtattgatttaaccctctgccccatggagtctatccaagagtgggtggacagcgaagcaaattttgaagttataaaagacgtcaaaggcttgtttgaagcctatcagcctaattccaagcgctattggactgctccacctactgaagaggaatttgcagcatcctgcaatgaattttggtgggtatcggcttatgttgttaaggccattcgaagaaatcagctgatctatgcgaccgaccacctctatggcatttgccagcaagaactcctcaaggtcttagcttggctggtgacaagcgataggggagtagttgatatcggaaagaactacaagcacctcttccagtatctaccagccgggcaagagaaggagttctcagcactgcttgatttatctagtatcgataaaatcactcagtctttatttgctaccatggggctattcaatcgagaagctcaaattctggcccaaaagatgggatttacttacgatatggaagttgcagagaaaatgacttcttatgctaaagagaaactttctaatcattaatgaatctattttaaactaaaaaaaggatcctttggttacttggtgtaactgaattcctctatatataaaagactactcaacattctttgaaaggagttgaacacgccctgagtgctgtgtgaaaaagataaatttctaattttcactttgtattttaagggctttgtatcttatgtctaatattcaaaatatgtccctagaggacatcatgggggagcgctttggtcgctactccaaatacattattcaagaacgagctcttcctgatattcgggatggcttgaaaccagttcaacgacggattctttattcgatgaataaggatggcaatacccatgacaagggctaccgcaagtctgccaagtctgtcggtaatatcatggggaatttccaccctcacggggacatttctatctatgatgccatggtccgcatgtctcaggactggaaaaaccgtgagattctagttgaaatgcacggaaacaatggttccatggacggtgatccaccagcagccatgcgttatacggaagcccgtctgtctgaaattgcgggttatcttttgcaagatatcgaaaagaatacagtgccatttgcctggaactttgacgatacagaaaaagagccaactgttttgccggcagcctttccaaatctcttggtcaatggggcaacagggatttcagctggttacgcgacagatattccgccacacaaccttgctgaagtcatcgatgccgtggtctacatgatcgaccatccatctgccaaggtagacaaactcatggagtttttacctggacctgatttcccaacgggtgccattatccaagggcgtgatgagatcaagaaagcctatgaaactggtaagggccgggtagttgtccgctctaaaacagagattgagcagctcaaaggtggcaagcagcaaatcgtggttaccgagatcccttatgagatcaacaaggctgttttggtcaagaagatcgacgatgtccgtgtcaacaataaggtagctggcattgcggaagttcgggatgagtctgaccgggatggtcttcgcattgccattgagctcaagaaagatgccaatgccgatctaatcttgaactacttgttcaagtacacagatttgcaggtcaactacaacttcaatatggtggcgattgacaactatacccctcgtcaagtggggattgtaccgattctctctagctacattgctcaccgtcgggatattattgtcgctcgctcgcgcttcgataaggaaaaggccgaacggcgcctccacatcgtagaaggcttgatccgcgtcatttctatcctcgatgaagtgattgccttgatccgtgcttctgataacaaggcagatgctaaagaaaacctcaaggtcagctacgatttcacggaagaacaagcagaagctattgttaccttgcaattgtaccgcttgaccaatacggatatcgtcaccttggaagaagagcatgccagtctcaaggagcaaatcgcgactttggcagccatcattggggatgaacggaccatgttcaacctcatgaagaaggagttgcgtgaagtcaagaagctctttggtaatccgcgtcgtagtgaattgcaagacactgctaaaacgatcgagattgatacagccagtctcattgttgaagaggaaaccttcgtcagtgtaacccgtgcgggttacattaaacggacctcgcctcgttctttcaatgcctcaacactggaagaagtcggtaagcgagacgatgacgagttgattttcgtagagcctgctaagaccactcagcatctcttactttttaccaacttggggaatgccatttatcgaccaattcacgaattgacagataccaagtggaaggatatcggagagcacctcagtcagaccttgaccaattttgagcaagaggaagaaattctctttgcggagattgtggatcggtttgagggagtaacctactttgcggcaactcaacaaggacaaatcaagcgctttgaacgcaaggaattgagcccatggcggacttatcgttctaaatcgactaagtatgctaagctaaaagaccaagacgaccgtatcgtagcagttgcgccagttgtccttgaagacatcatgattattaccaaaaatgggtatgggttgcgcttcaatattgaggaggtccctgtcgtaggagccaaagcagcaggggtcaaagccattaacctgaaagacggagatcaagttgctgccgcctttaagtcaacgactccaagcatgtacattctgactcaacgaggcagtctcaaacggatgttacaagacgatattcctgtgaccagtcgggccaaacggggactacaggtcttgcgtgagttgaaaaataaaccacaccgcgtcttcaaggcaggtccagttttcacggaccagggagattttgatctctttacgagccaagaagaagtggcagaacaagatcaaatccttcagatcacttccacaacaggtcaggtgacagaagttgatttgacacaattaagcatttctgaaagaacaagcaatggatcctttgtcaacgataccatttcggatcaagaagttttttcagctactatcaaataagagaaagcgtcggtccattctaggactgactttctttgaaaataaattttctgaaaattgaaaatttcgcttgaaattctcatgaaatggtgtacaatagtgtacatagattgagaaactgaatcgacctgcatcagatcgacaaggaatagaaaaaattaaaaggagcactatcatgacagtatcacttgattgggaaaaccttggcttttcatatatgaaattaccttatcgctatttggcacattatcgcaatggagcttgggaaaaaggggaattgacagaagatgcgactttgcatttgtccgaatcttctccaagtttgcattacggtcagcaagcctttgaagggttgaaagcctaccgtacaaaagatggaagcgtccaattgttccgtccagatgaaaatgctaaacgtttgcaacgtacagcagatcgtttgttgatgcctcaagttccaacggatatgtttgtggatgcttgtaaggcagttgtaaaagcaaatgaagagtatgttccaccgtatggtacaggagctaccctttaccttcgtcctcttttgatcggtattggagatattattggcgtaaaaccagcagatgagtatatctttactatctttgccatgcctgtcggtaactactttaaaggtggtttggttccaacgaacttcttgattcaagatgagtatgaccgtgctgcaccacatggtactggggctgcaaaagttggtgggaactacgcagctagtatgttgccaggtaagattgcgcatgatcgtaacttctctgacgtgatttatctcgatccagcgacgcacaccaagattgaagaagttggttctgcaaacttctttggaatcactgctaataacgaatttgtgaccccattgagtccttctatcttgccatcgatcaccaagtactctttactttatttggcagaacaccgtcttggtatgacaccaattgaaggggatgtctttatcaatgatttggatcgctttgtagaagcaggagcttgtggtaccgcagctgtcatctctccaatcggaggcgttcaacacggagatgacttccatgtcttctattctgaaacagaggtaggtcctgtcacacggaaactctatgacgagttgaccggtatccaatttggcgatgtcgaagcgccagaaggatggattgtcaaagtcgattaaaacgaaagcatctgagacaaaagtgtccaagcttcaatgagaacgagtcttaacgaaagaacacagcagctaatgtttctcttcattcgcttttaggctcaaaagagtgccgaatgaccttttcgggggtgggataaagaaggaatttctaactaaattctttctgacccactcccttttctcttgcgtcatcaagagaatttttgtaaaatagaaaaagtgaaaagagggttgaaatgagtaaaaaagataagaaaattgagattcaaatcgttgatagtaaagtaaccgtcggaaaagatacttttgatgggttcactttgtccattggaaagaaaacgattggtgaaattgcagacatggctggtcaatttgccattatcaaaaatggaaatgtggattctatttacaaaaaacttgaaaaagccgttgaaattttaatagaaaattataatttgaataaataagggcttgcaatcataataaatcaatggtataatagatcctgttgatttatatggagagatagcgaagaggctaaacgcggcggactgtaaatccgctccttcgggttcgggggttcgaatccctctctctccattagcgttcattgtgacgatgataaagtgactgatgtcagcgctctttttggggtatagccaagcggtaaggcaagggactttgactccctcatgcgttggttcgaatccagctaccccagttcttaggtaatatcagataagtgataaaatatctatccaggtattttatttctttataggatgagtcgttaaagattgtagttgatctcattgcgagtgcttgcttaggaaaaataattataagtatgtcaagttttagaaaacttgattgttggaggattttttagatgaatgaatttgaagatttgctaaacagtgttagccaagttgaaccaggtgacgttgttactgctgaagtattgacagttgacgcgaaccaagctaacgttgcaatctctggaactggtgtcgaaggtgtcttgactcttcgcgaattgacaaacgatcgtgatgctgacatcaacgacttggtaaaaccaggtgaaacacttgaattgcttgttcttcgtcaagtagttggtaaagatactgatacagtaacttaccttgtatctaaaaaacgtttggaagctcgcaaagcatgggacaaattggttggacgtgaagaagaagttgttactgttaaaggaactcgcgctgttaagggcggactttcagtagaatttgaaggacttcgtggatttattccagcttcaatgcttgatactcgttttgtacgtaacactgaacgtttcgtaggtcaagaatttgatgctaaaatcaaagaagtagatccaaaagaaaaccgctttatcctttcacgtcgtgaagttgttgaagctgaatcagctgcagcacgcgcagaagtatttggtaaattgaacgttggcgatgtcgtaactggtaaagttgcacgtatcacaagcttcggtgctttcatcgaccttggtggtgttgatggattggttcacttgacagaattgtcacacgaacgcaacgtatcacctaaatcagttgtaactgtaggtgaagaaatccaagtgaaagttcttgacttgaacgaagaagaaggtcgtgtatcactttcattgaaagctacaacacctggaccttgggatggcgttgaacaaaaattggctgctggtgatgttatcgaaggaactgttaaacgtttgactgacttcggtgcattcgttgaagtattgccaggtatcgacggacttgtacacatctcacaaatttcacacaaacgtgttgaaaatccaaaagatgttcttaaagttggacaagaagtaactgttaaagttcttgaagtaaatgctgcagatgaacgtgtatcactttctatcaaagctcttgaagaacgtccagctcaagaagaaggcgaaaaacaagaaaaacgtcaatctcgtccacgtcgtccaaaacaagaaaaacgcgactttgatcttccagaaactcaaactggattctcaatggctgacttgtttggcgatatcgaattgtaatattcaaaagaggctaggacaaaagtcctagcctctcaattgtttttggattgtcgagcaagacgcaggggttgagtgggctctactacgctgatctcatcagcttttacagccctactcaactgtgcggaggtgggacaacgaaatcgaattctaacgaattaccgatttctgtcccactctcttttttacttgtaaaattctcaagaatttgatatactataacagttgccacccttagtgtaatggatatcacgtaagattccggttcttgagatgggggttcgattccctcagggtggaaagaagaaaaggttgagtgttctcagccttttatttttttattcaattaaaaaagactctcgaaatttgagagtcttttccaatcagattagttttttgatgcttcttggaattcagggtttttccatgcttcatcaataattgctttcaattctttagcagaagcgtgcattttttgaagttctgcatcattcaatggaatgtttactggacgtacaataccgtgtgctccaacaacagctggttgaccgataaagacatcattgattccatattgaccttcttggaatactgaaagtggaagaaccgcattttcatcatcaagaatagccttagtgatacgagcaagggcaacagcgataccgtagtatgtagcaccttttttgttgatgatggtgtaagccgcgtcacgaacaccttcgaacaattcaatcaattcagattcttgaacgttttgagtgtctttaaggaattcttcaaggtttacaccagcgatgttagcgtgtgaccatacagcgaattctgagtcaccgtgttcacccatgatgtaggcgtgtactgaacgagcatccacatccaatttttcagccaaagcttgacggaaacgagcagagtcaagtgaagtacctgaaccgataacgcgttctttagggaatccagagaatttccatgtagagtatgtcaatacgtcaactgggttagcagctacgaggaagattccgttaaatcctgattcaacaacttgtgttacgattgatttgttgatcgcaaggtttttaccaacaaggtcaaggcgagtttcacctggtttttgaggagcacctgcagtaatcacaacaaggtcagcgtctgcacagtcagcgtactcagccgcataaatcttcttaggtgaagtgaaggcaagggcgtggctaaggtcaagcgcatctccgactgctttttcgtgcaattgaggaatttcgataattccaagctcttgtgcaattccttggttgacaagtgcaaaagcataagatgaacctacggcaccgtcaccgacaaggataacttttttgtgttgtttagtcaaattcatgagtctaaacgtctccttcatatttttttgagatagattctcatacgttttcattctaccacttttgaaagtctttgtcatctaatacagtatgaaacagcgatgtaaacgtttttatgtttgtgttcctaagaagaaaaaaaggctaaaatgtgttataatagtatggtgaattaagtaaagagaggcattttttgaatgcaggataagaatctaattgatgtgaatttaacatcagaaatgaagacgagttttatcgattatgccatgagtgttatcgttgctcgtgccctccctgatgttcgtgatggtttgaaacctgttcaccgtcgtattttgtacggaatgaatgaattgggtgttaccccagataaaccacacaagaaatcagcccgtattacaggggatgttatgggtaaataccacccacacggagattactctatttatgaagccatggttcggatggcgcaatggtggagttatcgctacatgttagtggatggtcatggaaactttggttctatggacggtgatggcgccgctgcacaacggtatacagaagcccgtatgagtaagattgctcttgaaatgttgcgggatatcaataaaaatacagtagatttcgcagataactatgatgccagcgagcgcgaacctttggtcttacctgcacgtttccctaaccttctggttaatggtgctactggtattgccgttgggatggcaaccaatattcctcctcacaatttgggagaaaccattgatgcagtgaagctgatgatggataatcctgaggtaacgacccgtgaacttatggaagttcttcctggtccagattttccgacaggtgctttggtcatggggaaatcaggtatccacaaagcctatgaaacaggaaaaggctcaattgttcttcgttctcgtacagaaattgaagtaactaagagtggccgtgaacggattgttgttactgagttcccttatatggtcaataaaaccaaggttcacgagcacatcgttcgcttggtgcaagaaaaacggatcgaagggattacagctgtacgtgatgaatcaaaccgtgaaggggttcgttttgtgattgaggtccgccgagatgcttcggctaacgttattttgaacaacctctttaagatgacacaaatgcaaaccaattttggtttcaatatgttggcgatccaaaatggtgttccaaagattctttctcttcgacaaattttaggggcttatattgagcaccagaaagaagtggtgactcgacggaccatctttgataaagaaaaagcggaagcacgtgcccatatcttagaaggtttgctcattgccttggatcacatcgatgaagtgatccggatcatccgcaatagccggacagacgctgaagcacaagctgaattgatggctaaattcaagctctctgaacgtcaaagccaagccattttggacatgcgtcttcgtcgtttgaccggtttggaacgagacaagatccaaagtgaatacgatgatttggttgccttgattgctgatttggctgatattttggcgaaaccagaacgtgtggcgaccatcatcaaggaagaattggaagaagtcaaacgcaagtttggcgatgctcgccgaactgagttgatgatcggagaagtcctttctcttgaagatgaggacttgattgaagaaacagatgtcttgatcaccctttctaacaaaggctacatcaaacgtttggatcaagcggaatttaccgctcaaaaacgtggtggacgtggggtccaaggaactggtgtcaaagatgatgactttgtccgtgaactggtctctacgagcactcatgatcacttgctcttctttaccaataaggggcgtgtctatcgtctgaaaggttatgagattccagaatatggccggacagccaaaggattaccaatcgtcaacctcttaaaattggacgaaggtgagtcgattcaaaccattatcaatgtggagcaagatcgaagtgacgaagcatatctcttctttacgacgcgacaaggtttggtcaagcggaccaatgtagctgaattttcaaatattcgtcagaacggtctgaaagctctgaacctacgtgatgaggatgaattgatcaatgtcttccttacagatggcaatactgatgtcattattggtaccaaatatggatattcagtccgctttaatgaggcagtagttcggaatatgggacgttctgctacaggtgtacgtggtgtgaatctccgtgatggagacaaggttgttggggcaagtgttatcaccgaccaggacgaagtattggtcattactgaaaaagggtatggtaagcgtacaatggctagcgaatacccaaccaaaggccgtggcggtaaaggaatcaagacagccaatatcacagagaaaaatggtcctttagctggtcttttaaccgttaaaggagatgaagatctgatgatcattactgatacaggagtcatgatccgtacaagtgttgggaatatctctcaaactggtcgttcaacacagggtgtgaaagtcatgagactggatcaggatgcgaaaattgtgacctttacaacagtccaacccgaagaaaaagatgaagaagtagtggaagaaaacgaatagataaggggacagcatgtcacgcaaaagaaaaaagaaaaagagtttacgcaatactcttatcaacatcgttgcaacacttttgattattctctcgcttctcttgattttcaatgctccgatccgaaacatgattatggtttggcataccaaccaataccaggttagcaaggtcgataaaaaaaccattgataagaataaagaagtgaagacgagctttgatttccaacatgtccagtcactctcgacggaagccgtcatcaatgcccaatggcaagctcaaaagctaccagtaattggggggatttcgattcctgaattgaacatgaaccttccgatctttaaggggcttgaaaatgtagccctatactacggagcagggaccatgaaggaaaaccaagtcatggggcaaggcaattattctcttgctagtcaccacgtgtttggtctaactggagcaaatgccatgttattctcaccattagagaaagccaaggcgggaatgaagatttacatcacggacaaagaaaaaatctatacttatgtcatctcgtctgttgagacagtgactccagaccgtgtagatgtgattcaagatcgtgaaggcgtcaatgagatcaccttggtgacctgtgaggatgctgcagcgacttaccgtacgattgtaaaagggaatttggaaacttctgttgactatgacaaggctccaaaagacatcctggattcattcagcaagacttataatcaaatgcaactttaagaaaataaagcccatggcagagatgccagggctttttctatgtaggaagcaaaactaggagaaattcttgtaaaattgtaagagattggtaatattatgtaaggaatttgtcataacattaagggaaaatcagtatataataagaggagaaagagtatgataaggaggtagaatagtgacgaaagagcgaatttatcatctcttacatcatttctacaatctcttagtaaatgattttccacgaaatggtttaattacgaaaggaatctacgaagtagagcaagtctaccaagctttagaggccatacctcagagccaggagtacttgattcgctgtgaaattcaacagtttttaaaggaacttgaacaagttcaaacaggttaccaaatccgctttaataaagatgaagtcttagtgttagatgacttgaaacaagaaattgcctgtaaataatgaaaggttgtcgttttctccatttattgcgaattaataagtgaggaggaaattatgtacgacatatcatttattgaaccatctttgcttcctagagaacgtttggtttctgaaggagtggataagctgagtcatcaagaattgttatccattctcttacggacaggcaataagaaaaaaagtgtttatgagattgcacaaggtcttttgagctcagttaatagtttaaaggagttaagtcaattaaccctagaggagctacaggaaatctctggcattggccgggtgaaggccatcgaacttcaggctgtgattgagtttggacgaaggattcataaagacgaattgatgagttccgaacagatcatgagcagtcagaaattggcacataaaattcaacaggaaatcggccataagaaacaggaacacctggttgccctctatttgaatacgcagaatgaaattattcatcaacagaccatttttattggaaccgtgaatcgaagtattgcggagccacgtgaaatcctgcattatgcactaaagcacatggcaacctctatcatcttggctcacaatcatccatctggtgccgtatttccaagtaaaaatgatgatgaagtaacacatcgagtcttagaggcctgtgaagtgatgggtttaaccctattagatcacttgattgtatctgaagaaaactattatagttaccgtgaagagacagattatttggtataaaaaagagagtgggacagaaatcagtaattcgttagaattcgatttcgtcgtcccacctccgcacagttgagtaggactgtaaaagctgatgaaatcagcgtagtagagcccactcaaccactgcgtcttgctcgacaatccaaaaataattgagaggctaggacttttgtcccagcctcttttcttgttaatgtataaatctttattcttcgttttttcgcatgaaataaaggagtgtttgcaattcactggtgagatcgacatattggacgacgacgtctttaggaactgtcagatggaccggagaaaagcttagaattcctttgacaccggcatctactaaaagactagccacttcctgcgctttaatacttgggacagttaaaattgctgtttgaatgccttcttttttgagattctctttgatcgtagaaatcccataaatggggatcccatccttacttttggtattaatcagttcatgatcatctagatcaaatgccatgacaattttcatcttattgcgttcatggaagcgatagttgagaagcgcacttcccatatttccgatccccacaatagcgacattggtaatggcattatcatttaagagatcggcaaagaagttcatcagtttttttacgtcataaccaaatccccgtcttcctaattcaccaaaataagaaaaatctcggcgaacggtagcagagtcaatcccaattgcatcagcaatttgctttgaattggcgcgctctattttttcagagttaaagcgtttaaaaatgcggtagtagagcgataagcgttttgctgttgcgcgtggaattggagtatttttatcatgtttcacaatatcacaacctttccctcttattgtataggaagattgtgaaaaaatcaactatctagaatcgtttttcaaaaatattttcgtctaaagaaaaagctgatggcgatgggagagttccatcagcatcagcttagttttcagcttgttctacctttttcagataagcatagagcccatcgacccgtcctgtataggggagcttttcccccttgtattcaatggatacgattgagtaagagtcaggcagggttacacagcctgaaaaagctaggatacaggctgcaaggtcaggataagtagtcgttcgttctacttggtaagcatcgatataagttaaggttaccatattagacctctgttttgttgaaaatttctctttcgacaagactatccattaggaaatagaatttttgttggatgatatcattctctggatttttaaagatattaaccaggcgaagtccagacttgtcagtaatattgatcttaaaacctgtcaaatctttattgaaaatgattttaagtaggaagccttcgccgctatttggaacgacttcgagcaaacgatttaactcgtaatttccaacttttgtaacagcgaatgtattgtcacgtaaggtatattttttaacatttgggtgtagactataggtatatttgcagtctttcaatgaaacacttgtttcaaaagccatattgttctcctatgataaaatttctttaagttttgagaggaagtcttgaacctcctctacggtattgagttctgaaaaactaattcgaagggattcttttaggcgtgagctatcttttccatagagtgcctcaaggacatggctgggttgaactgtaccggcggtacaagcagaacctgtagagacagaaattccagcaagatcgagtcgcatcaataatacatcattttggacacccggaaagccaaggttccaaacaaatggaagatgatcgtcattcgcatttacgtagtagtcgtagtctgttaaaccattaactagttcttggccaagtttttgaacctggttgaaattttcttcttgatgaagtgtagcttgctgaagcgcggttgccatcccgacaatagaaatgagattttccgtactggctctcatcttactttcctgatccccaccatgtaaaagattatcaaaatctggggaggttgcataaaggaaaccgacgccctttggtccatggaatttgtgggcagaagcactgagaaaatcaattcccaactcttcaggatagacagggacctttccgattgcttggacagcatcaacgtgaaaggcagctggatgatcttttaagagttctccgatttctttaatcggaagaagatcgcctgtctcgttattggcaaacatggtagagacaagaatggtatccggtctaagagccgccttgatatcactagccttaatgcgtccatctcttggttggacgatcgtaacttcaaatccgaaacgttctacaagatattcgatgggttcaagaaccgcatggtgttccaaagcggtcgtaatgatgtgtttgccatctgcttggtgtttcaagcagtagccttttataacggtattattactttctgatccacctgaagtgaagaaaatacgatttggaagagtatggagagactgagcaatttgctcgcgagattctcggagaagtttactagccatccgtccatgagcatgaaggctcgatggatttccaaaagtggtcttcatagtttcagacattttatcaatgacttcaggtagaaggggagttgttgcggcattatcaaaatatatcacattaagaccttatttcttatggtaggcaaatagaggactaacaggttttctttcttgaatgcgaacaatagcttcagcgatcagttcgctagctgtcagatagttaatattttttggtgttggtccatttggagcaacagaatcggttactaagatttctttgatcggagcttggtctaataattcaacagctccttttacaaataaaccatggcttgatacagcataaatttcagtagcaccttcgcgttcgacgattttcgcagcttctgagaatgtcttaccagtattgaggatatcgtcaatcaagatcgctttcttatctttgacatccccgataatatagccataatcacggtttgcatcatcttgctcgtaatcaatgatcgcaatcggtgcatcaagatattccgctaaactacgagcccgtttgacacctgaatttttaggactgacgacgacgacatcaggaccagttagacctttgttgatgtagtgctctgcaaaaagtggaatggtaaagaggttatccacggcaatatcgaagaaaccttgaacctgcactgcatggagatccagtgtgacgacacgatccaccccagctttgaccaacatgtttgcgacgagtttagcagtgattggttcacgaggagcagcagtccggtcttggcgagcataaccgaagtaaggcatgaccacattgacagtatttgcgctggcccgttggcaagcatctaccataattaacagttccatcaagtgattgttgacagggaaactggttgattgaatgatataaatatcatatccacgaacactttcctcaatattgacttggatttcaccatctgagaattgacgggatgaaattttcccaagtggaaccccagcatgatccgcgattttttgcgcaatctctggatttgaattgagagagaagagcttcatattttttttatctgacatgtgattccaacctcatttagatttttgatcttagcactattttagcaaaaatttgcgataatttcagctattttacaatctttccgccaatcttgcgattttattttttgcagctttgtagacgattccatgctctttgatgaactgatggaaattttcttcctgctcagcggtttcgacctcgatttctaattcataatcttcagtgtctagatagagactgtggtctagtgccaccaatcctgcagctgtttctttttcgaatcgttctgttgtaaggcttccccagacagcgagttgctcaacagagatttctttagagattaagaggtttttgatttctccgtcaggaaactgttggtgttgaaggatcgcctcggtttcttctgggctgaggttttgattgtactcgaaatggccaactgcctcagggactttgagagtcaactcagcttgatctgtgaaagtacgcacccgcaaggccattttttccttacggatgagctggtcgggggtatcgatatagtgattggtttggacaaccaattctgtatcatcaaaaagtggaaggagggattggtattcctccttgtctagcaaggttttgtattcaatttctaaatggttcattttgtagtcctttgctttttttcgaaagcgattcatgatataataagagatgtgtttattgtatacaaaaatggttcagattacaaggtggtaggatggcaattgattgggaaaacttcttagatccgtatatccaagcagttggggaattaaaaatcaaactgcgtgggattcgtaagcaatatcgtaagcaacaaaagcattctccaatcgagtttgtcacaggtcgtgttaagccgattgagagtatccgcgaaaagatgatccgaagaaatatttctgaagaaaatttggctcaggatatgcaagatattgctggtcttcgtatcatggtccagttcgtagatgacgtcgaagaaatcctagaggttctgagacaacggcaggatatgcgcgtggtccaagagcgagactacatccgccacaagaaatcaagtggctaccggagttaccacgtcgtggtcgagtatccggtcgatactattgatggaaatgaaacgatcttagcagagattcaaattcggaccttgtccatgaatttttgggcaaccattgaacactcgctcaattataaatataaaggagactttccagacgagatcaaaaaacgcttagagacgacagcaaacctggcctatctcttggatgaagagatgggggcaattcgggatgcgattcaggaggctcaagccctgtttgatccacttcatcgtaagttaaatgatggcgttggaaatagtgatgacacagatgaagactacaggtaaaaaagtatccattattcgcaatcgcaagcgtcaaagtgaagaggtttttcagcagttgcgctacaagcttcggaaaaataattttattttgacggagaagcacccggatattgtgatttcaattggtggcgatgggatgttgctatcagcctttcacaagtatgaacaccagttggatcgggtgcgatttgttggcgtccataccggacacttaggattctatacggattacttagacagtgaaatcgataagctggttgagaacttaaaatatgatacaggcgctaaggtttcctaccctattttgaatgtcaagattactttcgaaaatggggaaacccgtaccatgagagcgttgaacgaagcaacgattaagagaagcgaccggaccatggttgctgatctcacgattaatggagtggattttgagcgcttcagaggagacgggattaccgtttcgactcctacaggaagtacggcttacaacaaatccttgggaggagcagtccttcacccaactattgaggcgctgcagattgctgagatcgccagtctaaacaatcgtgtctatcgtaccttgggttcttctgtcattgtccctaaaaaggataagatcgagattacaccgacaagacctggcttccacattatctctgtcgacaattcaacctattcttaccgtaatattgcaaaggtagaatatcagattgacaaccataagattaattttgtggcaagttccagtcacaccagcttctggaatcgggtcaaggatgcctttatcggagatgatagagaatgagatttgaattcattgtcgatgagcatgtcaaggtcaagaccttcctgaaaaagcacgaggtttctaagggcctcttagcaaagattaagtttcgtggtggccagatccttgtcaatggacgtccggagaatgcaatttatttgttggatattggggatcgcttggtcattgatattccagcagaagaagggttcgaaaccctaaaacccatggatcggcctttggatattttgtttgaagatgatcattttttggtcttaaacaaaccctttgggattgcttctattccaagtgcgattcattccaataccttagccaattttgtaaaaggctactatgtgaagcagggctacgagaaccagcaggttcacattgtcactcgcctggacaaggatactagtggcgtcatgctttttgccaaacatggctatgcccatgcccgcttggataagcaattacagtctaaaacgattcagaaacgctattatgccttggttaagggttctgggaagcttgatcctgtcggagagattattgctccgattgcgcgtgatgaagattcaattatcacccgcaaggtagctaaaggtggcaagtatgctcatactagctaccaggttgttcaatcttttggtgatattcacctagtggatattcagttacacacaggtcgaacccaccagatccgcgttcatttttcccatattggttttccgctcttgggagatgatctctatggcggcagtttagaagacggcattgagcgccaagcccttcattgtcatcgtctatcctattatcatccatttctagaggaagaattggtcatagaaagtccactacctccagatttccaagctgtattaacacagcttcaaacaagttattaattattaaaaggagtaaaactaatggaagttttcgaaaatctcaaagccaacctcgttggtaagaatgcacgtattgtattaccagaaggtgaagaacctcgtatcctccaagcgacaaaacgcattgtgaacgagacagaagtaacccctgtattgcttggtaatccggataaaattcggatttatcttgaaatcgaaggggttttggatggatatgaagtcatcgatcctcattcttatccaggttttgaagaaatggtagcttccttggtagaacgtcgtaagggcaaaatgacagaagaagaagcgcgtcaagtcttgaaagacgatgttaactattttggtgtcatgttggtacacatgggaattgttgatgggatggtatctggtgcgattcactcaacagccgcaactgttcgtccggccttgcaaattatcaaaactcgtccaaatgtaaaacgtacttcaggggctttccttatggttcgtggatctgaacgctacttgtttggggactgtgccatcaacatcaatccagattctgaaggattagccgaaattgccatcaattcagctatcactgccaagatgtttggtattgatccaaaaattgctatgttgagctattcaacaaaaggatctggtttcggtgaaagtgttgataaggttgtcgaagcgactaagcttgcccatgaacttcgtccagatcttgaaattgacggggaattgcaatttgacgcagcctttgtccctgcaactgcagccttgaaggctccaggaagcaaggtagcaggtcaagccaatgtctttatcttccctggtattgaagcaggtaacattggatacaagatggcagaacgtcttggtggctttgcggcggtaggtccagttttgcaagggttgaacaaacctgtcaacgacctttctcgtggatgtaatgcagatgacgtttacaaattaaccttgattacagcagctcaagctgtagaacaataagtaatgcatttagagagtgggacagaaatcggtaattcgttaaaattcgatttcgtcgtcccacctccgcacagttaagtagggctgtaaaagctgatgaaatcagcgtactagagcccactcaaccactgcgccttgctcggcaatccaaaaataattgagaggctaggacttttgtcccagcctctttttctttataaaatcagaatttctaaactctaactcattctatggtatactaggaatatgttagatgtaaaagattacgggattaccatgtgggaggaggaaaaaatcgcctctttccgagaaaagttattagcctggtatgatgcccataaacgggatctaccctggagaaggacccaggatccttataaaatttggatctcagagattatgctccagcagacacgtgtcgatacggtgattccttattatgagcgttttttagactggtttccgacggtcgctgaattggctcaagcccctgaagaaaaactcttaaaagcttgggaaggcttgggctattactcacgtgtccgtaacatgcagaaagctgcccagcagataatggaaaatcacggaggagtgtttccatcaagttatgaggaaatctctaaactgaagggaattgggccttatacagctggtgctatcgctagtattgcctttggattaccagagccagcagtagatggcaatgtcatgcgtgttctagcccgtttgtttgaggtggactacgatatcggagttccgaccaatcgcaagatttttcaagctatgatggaaatcttgatcgatccggcccgtccgggtgatttcaatcaagctttgatggatttgggatccgatattgaatctccagtcaatccacggccggaggagagtcctgttaaggaatttagtgcggcctaccaacatgggaccatggatcgttatcccattaaggctcccaagaagaaaccggtacctgtctatctaacagcctttattatcaaggatagtcaaggccgctatttgttggagaaaaatgagcgagaggggcttttatcaggtttctggcatttccccttgatcgaagtggatagcctatctgagaacctaggccaattatctctattggacgggaagggggaagcagagagtaacccagaaatcctttcctttgaacaggactatgacttagccattgattggcaggacagatcgtatcccatcgtccagcatgtcttttcgcatcgcaagtggcaggttcagatccgatatggtctggtaaaagaaggtgaagagttagtaagtgaatcgacggtttggttaacaccagaagaattttcggactatccttttgctaaacctcagcagaagatttggacatctttttcggaaaatgaaaaatagctagagactgatctctagctatttttttataaatgagcgaatgctttgatttcttcttcggacatggatgagtcgcaacgaacagtgacttcaccggattcgacatgtaaaaatcctgggacagttgggataccgtaggttgagcggaaggcttgtaacgcatctagctgactgggttcttcactattgatgaagtagacatgagcttttgtttcagctacgacagttgctaacttagcagcaaacttccggcagtaaggacaagtcttgcgtccgataaagaaggtcgatgtttctttttgatcgatcgcttcttgcgcacgcgcgacagttgtgacttcaagatctttaatatcttctaaaaattgttccatgagattacctcgctttcttctatgtctagtatgccatattttctataaaatcgctggtatttgctacgaaagaaagagagagtgggacagaaatcggttattcgttagaattcgatttcgtcgtcccacctccgcacagttgagtagggctgtaaaagctgatgaaatcagcgtagtagagcccactcaaccactgcgtcttgcttgacaatccaaaaataattgagaggctaggacttttgtcccagcctcgtgttttagcctacaaaagcattgatttctgcttcgatgttcgcaattttttctttagcatctgcttcagattcaccaactgtagcgatgtagaatttgatttttggttctgtacctgaaggacgaacggcaaaccatgaatcatcagccaagatgtatttaagaacgttacttggaggagttgtcaatttttcaacgccgtcagcagtagtagctgtttgttccaagaagtcttctgtcttagcaatgtctgtgttgttgaattgtttaggagcattgccacggaatttatccatgattttcttgatttcagcagctccgtcaacacctgaaagggtaacagagatggttttttctgcgaagtaaccgtattgtttgtagatttcttcgataccatctgccaaagtcataccacgtgagcggtagtaagctgcgatttcagcaacgataagaacagcttggatagcgtctttgtcacgtacgaatggtttgatgaggtaaccgaagctttcttcgaaaccaagcatgtaagtgtggttgtgttgcgtttcaaattcatgaatcttttcaccgataaatttgaaaccagtcaagacgttaaacatggttgcgccgtagctttctgcaatcttagttaccaactcagttgatacgatggatttacagagcgcagcattggcaggaagtgtaccagctgttttgtgagcttcaagaatgtatttagcaatgatcgctccgatttggttaccagaaaggttgaggtaagaaccgtctggttggcggatttcaacaccaaggcggtcagcatctgggtcagttgcaaccaatacatcagcgtctactttgcgaccaagttcttcagcaagagcaaaggcagcttggttttcagggtttggagatttaacagttgagaagtcagcatctggaacagcttgagcttcaacaacttgaacagcttcaaatccagcttgggcaagagcacgacgagccaacatttcaccagtaccatgaagtggagtgtagacaatcttcatgtcgcgaccgtattcattgatcaagtcttggttgatgttaacgcctttcacttctttcaagtattcagcgtcgacgttttcaccgataacttcaatcagaccgctagccttgcttgcttcaaggtcagccaatttcacagcgaatggattttcgatagcacggatgtaatctgtcaatgcatcagcatctgctggaggcatttgtccaccgtcttcaccgtataccttgtatccgttaaatggagcagggttgtggctagcggttaccatgatcccagcaaatgtgtggaggtgacgaacagcaaatgacaattcaggtgttggacgtaggctttcaaatacataagatttgatcccatgagcagccaaaacttgagcagattcaaaagcaaactcaggagagaagtgacggctgtcgtaggcgatcgcaacaccgcgtttcttcgcttcctcaccttttgagtcgatcaattgggccaatccttcagttgcttggcgaacaacatagatattaatacggttggtaccagcaccgattaatccacgcataccagctgtaccgaattcaaggttggtatagaaggcatcttcttttgttttttcatccattgcgaccaactcatcacgaaggtaagctggtaattcagcaaagtcgagccatttttggtagttttcttgataggtcatgcaagcgtctcctttttgcttataatttaatcgcttacattatagcaaattttttcagaaaattctagcgataattgtaaatcttttcaaaaaaatagagctaattcaccatcaaaaaaagccaagataaattggtcttggcttcaaaggttattttaatttttcaagagatggaacgactgcactggtaatgagtactgtcgcaatgacttcgatgagtgagttagtagagacaatcaaggctaggaaatgttgaatcccaccaccgaagctatttccaaagaagaaataaatcccgcttagaacgaagactgtattggtcatagagccgacaattccagcgatcacaagtcctgtacgattgcgaatccagcgatagacgaagtaaggggttaccccgatgagaatccgagggactatggcaatgataagggagtagagatttccgtgagggacaaagggactaaagagatagctggctggtgttataaccagggtattcatagtaaggctaaagagtcccatgaggagtcctaagatagctccaatccgtggaccgtatatgatagatgcgatcacgacaggaatatgaaccaaggttggttgaatgcctgatggaacgaattgcagaatgaaggatgtcacaaagtgaatggtgatcatcaccgcaaaaaagatggcaattcgtgaaatagaagatgattttctcataaacaattctccttaacagtttctacaatagtttctacagttgctaaagctccagcacctttgtccccacaagcaagagtagcttcacgaggttggataatctggtaaccatagtcttgtaagagttttagatttcgttgagttgctgggtgttccagcattttcgtattcatagcgggggctagtaattttttagttccttgaggcaaggctagagctgtgcttgtgaccatattatctgcaagccccatggccaatttagcaatggtattagcactggctggcgctacaagaaagaggtccgtttctttcccgatgtcgatgtgctcaatccgctgaggatcctcttcaatcaggacatccagcccaactggattttttgagagaacctgtagggttaagggagtgataaattttctggctgaaggagtcatgaggaccttcacttcaaatcccaatttggttagttggctggtaatatcagcagccttataggcagaaatactacctgtaacagctaatgtaatttgtgtcataagttccattttatttgatataacgtaggatagcctctgcgatttctgttttcgtagaagcttctaggacgtgatcatctgtcactagataagcttgatgctgaccgttttgaattttggtcagatcattggcaacgatcatgctggcatgatttttaacgaggctttcacgcgctacctggatcaattcttcagaagaaacgtcgactaatagcttaaagccgatcagttgaatggtaggatcccattctttgacgagcgagataatcttcggatttttctttaaaaagagcacttggtattcttctttcgaagaaattttagcttcctgattttcgcgatggataaagctatgaaggtcttgagctttatcaacttcatcaagtcctgtcatgtaaacaggtgtgtagtctgaaacagccatagcgtgaatcaaaacatgatgatgagggacttccgttttcatttgtgcgagtaattcttcgacattctggatcaatagaagacgaaggtgtgggtgaggatcgggtttaagcgcgataggcgttgtgatcaaggttacctgatgtcccttagcaagagccatttctgcaagaattttccctaggctcccggtggaatgattggtgatagaacgaacactatcaatggcttcgctcgtcccgcctgatgtaattaaaatatgcatatgcttattttacacaaaaaagatacgtaagtaaagttctgaagctattaggattaactatgtgtagccataaaatttagataaaaaacgaacgttgaattcaaaacatggaaaaacaatgttattttcgcgaattttatgtataatagttctatcaaatataaaggagtcccttatgaaaacagatatcgaaattgctcaaagcattgaactccaaccgattgtggacgttgtgaagaaaattggtttggttgacgatgatcttgaattgtatggaaaatacaaggcgaaattgagctttgataagattcgtgaagttgagaaaaattcagtaggaaaacttatcttagtcactgcgatcaacccaactccagctggagaagggaaatcaaccatcaccattggtctagcagatgctttgaataaaatcggtaaaaaaaccatgattgccattcgcgaaccttctttaggtccagttatggggattaaaggtggtgctgctggtggtggctatgcccaagttctaccgatggaagacatcaaccttcatttcacaggggatatgcatgcgatcacaacggctaataacgctctctcagcattgattgataatcatttgcaccaaggaaatgagctaggaattgaccaacgtcggattatctggaaacgggtagtggacttgaatgaccgcgctcttcgtcatgtttctgtcggtcttggcggtcctttaaatgggattccgcgtgaagacggttttgatattaccgttgcttctgagatcatggccatcctttgcttggcgacagatattgaagatttgaaaggccgtttggccaacattgtaattggttaccgttatgatcgtagtccagtttatgtccgtgatttggaagtggaaggggctcttgccttgatcctcaaagatgcgattaagccaaacctggttcaaaccatctatggaacgcctgcctttgttcacggtggtccatttgccaatattgcccatggatgtaactctgtattagcaacgacgacagctctgcatttagctgattatacgattacagaagcaggttttggggctgaccttggcgctgaaaaattccttgatattaaaactccaaacttgcctacatcaccagatgcagttgtgattgtagcgactctccgtgctcttaagatgaacggtggagtgactaaggatgctttgactgaagaaaatgtagaggctgttcgtgctggttttgccaacttgaaacgccacgttgaaaatatccgtaagtttggcattcctgcagtggttgctatcaatgaatttatcaccgatacagcagcagaaattgctactttgaaagaattgtgtgctgaaattgaggtgccagttgagcttgcgagtgtatgggcgaatggtgctgacggtggagttgaacttgctgaaaccttggttaaaaccatcgaaacaagtccagctaactacacacgcttgtatgataataacctttctgttgaagaaaaaattgaaaagattgttacagaaatttatcgcggtacgaaggtgaattttgagaagaaagccaagacacaaattgcccaaatcgtgaaaaatggttgggataagttgccaatctgtatggccaaaacacaatatagcttctccgataatccaaatgccttgggagctccggaaaactttgaaattactattcgtgaagtggttccaaaattgggagcaggctttattgtcgctttgactggggatgtcatgaccatgcctggtctaccaaaacgtccagctgctttaaatatggatgtggctgctgatggaacagcgatcggcttattctaatagacgcctgatgacataaaataacttctgttcaaatgagcagaagttattttattatgtactcgtcgaatgttatgatgcaagaagctgatgactggctttgtggtaggtaaaccaaagttgaagggtcattggaacccaaatgagaggctcacaaagaatgactcctatatagcctgtatgagggataatgaaaagtacaaagagaatttttcctgttaactcgataaagctagaaatcaaaggggtcaattttctaccaataccttggagggaattccctaaaatcaagaggcatcctaagaccggatagaagcaggagctgatttgcagatagagactggcatttgcgatcaagttaggatcgctagatccagatatgaggtttgttaagaacgggcttgtaaagaagaggaggatggcaacaatgatcgaccaaacgaaggagaggagacaagcttgtttaacgcctttttgaatgcgtcggaattgtttggcaccaaagttttgcgaggtaaaggtcgtcatactagtggaaatagcagccattggcagaagggcaaaggacatgatccgacgcgctgagatatgagcactaatgatggtcattccaagcttattgatagctgattgtaagatgactgttccgatagagacaatagaagacatgagccccatggtaaatccctgactgattaagtcctgatagagcctttgatcccaaacaaaatcgttgcgatttggcaggaggaaaggcacttttttgcgaatataaaagaaacatagaagtgcagagaaactttgcgcaataatggtcgcaatcccagcggattggactccgagatggagttgggtaataaaataaagatcaagaagaatattgagaacggcagcgataatcaagaagtagagtgccgctaagctatcgccaaccgctcgaagaagtccggcacaaagattataggcaaaggtcacagctacaccattgacaatagtggagatatagagataggactgagctataatagctggtggggtccctaaaaactggagaaggggataaagacccacaacaccaatagatatcacgaagagactgaggatgccgccaataacagcagttgctgcgacagattttcgtaattggtcatcgtttttagctccataatttctcgcgataatgatgcccatcccatttccaacaccgacagcaaatccaacaatcaaatcaaaaatagcagaggtcgccccaacggctgccaatgatttttgacctaaaaatcgtcctacaatcatgacatccgaagtattgtagagttgttggaagatattggataaaagaataggaaaggcaaaacttaaaagagtaggtaaaataggaccatctatgagggccacacgttgaattcttttcataatgtcattataccaacttcagtaaccagcgacaagcattggtggttgaatccccttacattttttgatataatcgtgtcagaaaaggaggccatatgagcttaacgagccaattaatcactgaaacgttcccagatctggataaggtcgaaaggctgaatatcgaagcatttccagaagaagagcgtgttcctttgtcagaatttttacgctatacggacaatgacgatgccaatttctttgctttttataacgaggaagaatttgtcggatttgctttttcaatctataatcagaaagctttttatgtcagtttctttgccattatgccacatttaagaagccacggatatggtcaagaaatcattgaaaaattggtggaattttaccaaaggaccatgattcttgaagtggaacgtttagatgaagaatgcgacaatatagagcagcgtcagtctcggatggatttctataagcgaaatggatttaaaactgctaatgcttttttagaatacgatgatctgagttttgagattctttatcgaggcgatcaatttgatgaagaggcttatcgggacatcttccataaactgcaagcagagaattactttgatttccgtattgaataccgacgcttcagtgatcattagacatgatataaaaaagttctcagctaatttgcggagaactttttttggttaggaaataaagaaatagttcacgatactcatgatttgtgaaaagaaccaaggcagaaatagaaaagctaagaaagcagcatgccatttccaatagagagaaactagcccaaccgtctctcggatccaagccgatgggagataataaaaagctgtttttgaaccgacactgcgtccagggatttttaatcgtctcataaagacaccagcccgaagagcgtgaaaggaattggtcaccacaaggacactctttcctagtccctgatcttcaagaatagccttgctaaaggtcagattctcaaaagtcgttcgagaacgattctcaatcaaaatgtcttcctgtggtacaccctgttccatcaggtactttgccatagcttccgcctctgaggttaactcatcagcaccttgtccaccagaaacaattagttttgatcgtccctcaaactgctcatagatagtctttgctttagttagacgctgggctagaagtggtggaactttatccccaatcaaacctgagccaaggacgatgatagcatccggttccttacggatggggaaaaaattacaaaaggttccataaaagacataagagagataaagaaaggtcgagtaaaagagggcgaagtctgttgggtaaatcaagatatcttttcctgggaaatgaggaaggaaatgaagcgccaaagtgccgataataaagatcccatataggagcgagaggaggtttgccaaccttttgccttcaaaagatatcatttgacggccgttaaaaagaagaaaaacagttgagaaaataatactgagtaaaacgaggatagcaagtactgaaaagataatgatggcaaccttttggttaaaccagagctccgtacgaacaactagtagaagagcggaaattaggaggaaaaggccgaaacttattgaaaagaggtaagcattgatcagtcttctgcggtcgttcaaaaagaaaaataaaaaaatggtagctggaaccaaccagaatatatttagaaacatgataactcctagatgtagtagtagttcaattgtaacataatttactaagaggtgcttatgaactccacaatcgttcaatgttgttaaaagccttaactgctaattgagaaaatcaatagattcagaaaaaaggaattgccgtggcggataaaagctgttatactagagaagattgacaaatgtaaaggagaacacatgttacgaaaaggttccttaacaggtttgctgttatttggtattttcttcggcgcagggaatttgatctttccacctgcgctaggtgcccagtcgggtagccatttttggccagctattgctggatttgtcttatcaggagtagggattgcgattatcaccttgattattgggacactcaatcctaaagggtatatccatgagatttcacgaaaaattgctccttggtttgccatcgtttatctggtagccttgtacctctctattggtcccttctttgccattccaagaacggctactgtttcctacgaagttgggattgcccccttgttaggacaatctggtggtagtctcttcattttcaccttggtttatttctgtttagcctatttgattgccctctatccatctaagattctagatagtattggtcggattttaacacctgtctttgctatcttgattgttgtactcgttgtccttggtgctctcaagtacagcggacaagcgccacaagtggcaacagcagcctaccaagcatcttcctttggtcaaggtttccttgaaggctataataccttagatgcccttgcttcagtggcctttagtgtgattgcggtaaccaccctcaatcaacttggtttcaccagcaagaaagaatacattaaaaccatctggatcgttgggatcgtcgtagccattggctttagtattttgtatattggattgggttatcttggaaatcacttcccaattccagcaaaagtgatggcatctgatgccaataaaggggtctatgtcctttcagaagcgaccaaggctatctttggcccagctgctcaaatattcctcgcaggtatggtgacggtgacttgtttcaccacaacagccggtttgatcgtgtcaacaggggaattcttccataacactttccctaaaatctcttacaaggtctatgcgacaatctttactttgattggttttgcgattgccaaccttggcttgagcgccattattgcctattcattacctgtcttaatgattctctacccaatcaccattaccattgtgttgattgtgattgttaacaaatttatcgatctttcaaaaccaggaatgcaactgactattttcttagttagcttggtggcgattgcagatgttcttgcaagcacctttaaactttcaagcttagctaacattattaaaactttaccattttctgcggagtctcttccatggttacttccagcagtagtcgggattgtgctctctctgttcttacctaataaacaaagcgcataagaagaataagatttgctagaaactctaaagttacctgctttagagtttttttgattttgaaactagtaacgaaatggattctttaaaaccaaaacgtagcagaaatttttaatttaaggaagggcatgttatactatttctaacatatcaatatacggagcattttatgaatcaaatcgttttctctttcactgtctttctggcaggggttctctcctttttctctccctgtgtctttcctttgctcccggtctacatcggcgttttgctaggaagtgatcaggaaaaatccgttcagatttttgggaaaaagatacgctggcatggcatcgttaagaccttgtgttttatcgcaggtatttctgttattttccttatcataggtttcggagctggcttattggggcaggttatgtataccaactggttccgctacgtgatgggagcgctgatcattatccttggtcttcatcagatggaagtctttcattttcatttccttgagaagcaaaaatcagtagattttggagctaacaaacagaagaatgagttgttttcagcctttcttcttggtcttggctttagttttggttggacgccttgtatcggccctgtattgggatcagttcttgctctagcagcatcggatgggcaagatgctcttatgggagctatttatctccttgtttataccttgggaatggctcttccgtttttactcttggccttagcatctagtctggtcctaccttactttaatcgtctcaaaccccatttgttgttgctgaagaaaatcggcggagccatcattattctgatgggaattctcttacttttgggacaattgaacagtttgtcatctatcttttcataaaataatccggaggtttaacgcatgatgaaaggttttaaatacgcttgtttctcagtactttctctagctttgctgtcagcttgttccatggatcaatccagcgagagtagtatgggcaatcagccaacaatgaatacaacaacgaataagaatgctttggtaggaaaagacgctagtgactttgaactaaaggatatgaaggggaatacggttaaactttcagactacaaagggaagaaggtttatttgaaattttgggcaacctggtgtggcccttgccggcaaagtatgcctgaactagagaaattggtcaaggatacggatagagactttgaaattctgaccattatggcaccaggactccaaggtgaaaaaacagaagaagaattcgttaaatggtttgatcaacaagattataaatccgtaccggtcttgtacaatccagacggttctgcatttgcagattatcaggttcgctctattcctacagaagtctttatagacagtcatgggaaaattggacatgtccaattaggggctatttcaaacgacgatgctaagaagattatcaaagagttacaataaaaaaatgaagcacgaagcttcatttttttattagttgcttgcaccagaagttgcatcggcatctccgtgccctccgtcaccatgtcctccagcatcagaagcaccagaagttgcatctgcactaccgtgtccaccagcaggagcaaattgaccgcttccgccaactagacgttggccggttgtttgcaggtaccagtccaaccatggtttgaagttgaagacaatctcattgataccagcgtatgaaccatcttcatagtacatagcttggtagttgtgagtgttgatcacgccttcaggagatcctggaacaatagtccgaacatagtcttggttaccgttacgaagggtaccaatcacccattccacgtttttcatacgtgctggtggtagggaaccatgaacggttgacatccggcttcctgattgaggtggcacgcgtttggcaaacatggtatcaggatcttgatgggcattgttgtagtagaggaattggttgttatcatctgcgtaggttaactcaaaaggcatcgctttcaagaacatatcaatttgattaacagttaggataccatggtctagtttcacataggtatcaccagacacagctcctgtgatttctgcaaccttttcaacccaatctggatcatcaggatcgacctcagtgacagtagtagaaattggatgattacaatccaaatcttctggttcaattggttttggttttttcaatttggacacaacctcaacgtatttcataaaattatccaagcaggtttcaaggaatttgacggttccctcgttaatgatattaccttctgcatcaaaagcttctttcgcttttccaaggaggaattcattacctggaagggtataagcattgacacctggagcatctaagatcttacgaaggtgaacctgagcacgtgaagtaccttggtcatagtaagaagcaccgacgatcatgactggtttgttttcaaatggatgtacctcgaaagagagccattcaaggacagacttgagagctgcagagatcgtatggttatgctcaggagttgcaataataaccccgtctgcacgattaattttattgtataagagacgcaattgaaaactttcgtcccatttttcgtcttggttaaacattggaacttcgtcgatttctagaacttccaattcaaatttgagcttaaatttgcgttgaatgaattccaagagtttacggttataagattgatcatagtttgatcctacaagtccaacaaatttcattcttttcagtctcctattttacaagttttcccagttaaaatcttcagcatctttgcgaagtaattcatgggcgttgcgcaatttgtctgtgatttttacaaacacacggaaatcattgaagacggcatctaatttttgaatgacatctaaatccaccaagtctccattttgatcaaaggcttgcaatgaatgggagagcaagaattcatctggcaagacattcgctttgatttctggagcatttaagatttggcgaagttggagttgggcgcgtgaagatcccaacgtaccgtatgaagccccagtaatcatgaccggtttgtttaacaatgggaagactccgtatgacagccaagcgagtgcactcatcaagactgctggaatagagtggtcgtattctggagtcccaataatcaccccatcagcttcttcaattttggcaacaatctctaagacagcttcaggcacttgtttgtcggctggcttgttgaagacagggatatctttgatttcaaccaattcaatttcagccttatcagcaaaatgtttttgcatgtattgaagcagttgacggtttgtagaacgtttggagttagtccccacaatcgcaataagttttatcatggaaaattcctttctgataggagaattataaataagattgaagcccacttgtataggcaatcttgcctgattgagaaaccaataaggtatctataccaggaagtgattcaacagtgttgaggatagaagcaggagattccccgaacaagcgggtagtccatatctccccgtctacggatcgatcagatatgatggtgatactggctaagtctgtctcaaccggatagcccgtcgtgctatcaaagatgtggtgaaatgactggccgtccacttctaaatgacgctcgtagatgccagaggtgacaatagatttatccttgacagagaggaccagtaggtgctgacctcttttttcgactggattttgaatgccaatccgccaaggttgttgtttgacgggatgttgaccgacagtgaggatatttcctccaagatcgatcaaggcatctgttactccctggctctttaaaaaggtcgcaatgcagtctgcactatagcccttagccaaggcacctaaatcgatcttcattccaggacgcataagaaagaccgtatggttttctgggtcgagctgaattcggtgaggatcgatcatggtcagagcttgattaatttccccttgctggggacgtctagcatctgaaaatccaattcgccaggtctgtacaagaggaccaatggcgatgtttaaatggctgttctgagcttgactatgcaaggttcctaatgcaatcagttcaaaaagatctggatgcacttggactggagcaataccagcttggtgattgacctccatgagttcagaacttgcatcattagcactgaagcgatgttcgtaggagcgaagaagttcaaagcagcgggctaagagttcattcgcttgtgggtgacagatcgaaacagtgatggtcgttcccatcaaatgttcggatcgactacttaggtccactaaaaatctatcctttcctattttcacttacctacagtatatcaaaaagatatcgttttcacaatcctttcaagcatattgtttgacattttttgaaacatgtgaaatgtgattttctggaaaattgaaaaaaagatcacaaattctgagcaaaataattgtaaccgatatcatttttatgatatactcaagaagtaaattaaattaaaggtaggatttattctatgagtaaaatcgttgttgtaggggctaaccatgccggaacagcttgtatcaacactatgttagataatttcggaaatgaaaatgaaattgtggtttttgaccaaaactcaaacatttcattccttggatgtgggatggcgctttggatcggtgagcaaatcgatggtcctgaaggtcttttctactctgacaaagaaaaattggaagcaaaaggtgcaaaagtctacatgaattcacctgttctttcaattgactatgacaacaaagtggtgactgcagaagttgatggaaaagaacacaaagaatcttacgaaaaattgatctttgcgactggatcaacaccaatcattcctccaattaaaggagttgaaatcgtacctggtaaccgcgaattcaaagcaactcttgaaaatcttcaattcgttaaattgtaccaaaatgctgaagaagtcatcgaaaaattgaaagacaacagcaaacacttgaatcgtatcgccgtagttggtggtggttacatcggtgttgaacttgctgaagctttcgaacgtcttggtaaagatgttgtcttggtggatatcgtggacactgttttgaatggttactacgacaaagacttcactgacatcatggcgaaaaacttggaagaccacaacatccgtttggcacttggacaaacggttcaagcggttgaaggagacggtaaggtagaacgccttgtaaccgataaagaaaccttcgatgtagatatggttatcttggctgttggtttccgtcctaatacagctcttgctgatggtaagatcgaactcttccgcaacggtgccttccttgttgataagaaacaagaaacttcacttccaggtgtatacgcagttggtgactgtgcgactatcttcgataacgctcgtaacgaaatgagctacatcgctcttgcatctaatgcggttcgttcaggtattgtcggtgcctacaatgcgactggtcatgaattagaaggaatcggtgttcaaggttctaacggtatctctatctatggccttcacatggtttcaactggtttgacgcttgaaaaagcgaaagctgcaggcttcaatgccactgaaactggctttaacgacctccaaaaacctgaatttatcaaacacgataactatgaagttggtatcaagatcgtctacgataaagacactcgtcaaatccttggagctcaaatggtatcccgtgatagcgccatctcaatggctatccacatgttctcacttgcgattcaagaacacgtgacgattgataaattggctttgactgacttgttcttcttgccacacttcaacaaaccttacaactacatcacaatggcagctttaactgctgaataatgaataactgaaaaacaaagctagcgttgctagttttgtttttttctgtctttacatgtattcagaagcagtgaaataaggtataatgaataggataagagtttgaaggagttagggaatgtctgctaaagaagaagccattaaaaatgaatttcaatttgcctctagttcgattgtggcccatattgtcagaggtgttctggttgggatcgttgtgggctgcatcgtctcgagttttcgttttttgatcgaacatatttttcattttgttcaaggcgtctacaaggagatgccgactcaaccgctttatttgctggcgatgctgttgggctatggggggatcgtactgattgctggtcgccttattcgtaccaatcgggatatcaagggatcaggaattccgcaagtcgaagcggagcttaagggtctcttggcggtgagctggtgggatactctgtggaagaagtatattttaggtgtcttggccatcggaagtggcttgatgcttggtcgtgaaggtcctagtattcaattaggggcaatgggtggaaaaggagtggcccatcatttgaaggtcagtccggttgaggagcggtctttgattgcaagtggggctgccgctggtcttgctgctgcctttaatgcacctattgcgggactcttatttgttgttgaagaggtctaccatcatttttcacgtttcttttggatttcgaccttggctgctagtttaactgctaattttatttcactcaatgtctttggtcaaacacccgtacttcatatgccacaaaatattccgccactccatctgtctcagtactggatttatctttttcttggagtctttttaggggcagcgggttatgtctacgaaatagtggttctcaatatcggtcgcctgtatcgtttgctagagaagtttttccgtgttacttcacattattcctctttatttgcctttgtcttgattcttccaatcggctattttcttccccaaattcttggtggtgggaaccaattggtcttggatttagctcgagtaccgtatccagtgctgaccatccttctttattttgcgatccgtttcatctggagtatgttgagttatggtagtggcttaccaggtggcatcttcctgcctatactagcattaggatcacttttaggggccatcgttggaaccttcctccaaaacattggctttatctctcaaaatcagctgcctcttttcatcattttaggaatgagtgggtattttggggctatttcaaaagcgccattaacagcgatgattttagtgacagagatggtcggtgatattcgcagtttaatgcccctaggcatggtgaccttgctggcttatatgatcatggatctcttccatggagcgccagtctatgaagccatgctcgagcaattgttgccggataaggcgcaagaagaaggagagttgactttaattgagatccctgtatcagaaaagatcgcaggaaagcaagtccatgaactgcacctccctcaagatatcttgatcaccacgcaaatgcgaagtggtaagagctatacggtcaatggtgcgacccgcttgtatctaggtgatagcatctttgtggtggttaaagaatccgaaatcggacgagtcaaagatattcttttgtaaaagacagattctcagaaaagtttttctattattaaattttcagacaattattgaaaaatgagaaaacatctggtaaaataagggcaagaacaaatgaggagaagtctttcatgaaaaaatatagtctactcttattgagtgttgctcttttagcagggtgtgcaaatactactagcaaacagtccagtcaaaagacgcaaaccagcttaacggtgcagttgtcaaaggctgaccagaagaccttggacaatgcgacagctgaatacaaagactttgttgaaatgcaaattgaccaattgctcaaggatacagaaggattccgagctaccctaaaagacgggaatttggaagaagctaaaaaacaatatcccttgatccgtatggcctatgaacgttccgaaccgattgctgaaacctttggagaatcggatgtcaaaatcgactaccgtttggtggattatgtggatgaaaataaatcagaagatggctggtcaggtttccaccggattgaacgtatcctttgggaaaacaataccacagatggaacagacaaatacgttgaccaactagtgaacgatatcaaggagttgaaagctaaaattgctacagtagaagtaacaccggatatcatgttgaccggagctgtcgatttgctcaatgaagtggcaacgcaaaagattacgggtgaagaagaagtcttctctcatacagatctttacgacttccgtgccaatattgaaggggctgagaagatcttctctctctttaaacccttgattgagaaaaaagatgctaaattggtaaaaaccttggaagcagaattcaaaaatgtgaatgctttattggacaaacacatgacagatgattcaaactataagtcttacacagatttatccaaggaagataccaaggaattggcagaagctgtgaccaaacttggtgaaccattatctcaaatgggtgtgattttagatgggaaataagaaaaatggctgacgaaaaatttttagataaaaaaatggaccgtcgtgaatttcttaaaaaagcaggtattggaggggctggtctagcgctgggcctctctggtgcatctgcttttttcgctaatcaggacagttccagcaaaaaagcttatgatggggatgaagacatctccttttatggcaagcatcaagcagggattacgacgcccatgcagaaggcttgctacttggtggtgttagaccttcacacgacggacaaaaaagaagtcatccagctctttaaagactggactgattacagtagtaaattagtcgaaggggaattggtcaaaaaagatggggccaatgccctcttgccaccaacagatacaggtgaaacagtaggactcaacccctatcgcttgagcctgacttttggggtttctgcttcctttctaaagaaactgggcttggagtccaaacgtccgaaactttttcgtgatttgcctccatttccaaaggagcagttgcaggacaaatacactggtggcgatatcgtcattcaggcctgtgcagatgatgagcaggtagcctttcatgcggtgcgaaatctgattcgtaagggtcgaaataccattaccatgaagtggagcaaatcaggatttgcagctattggcgaccgaaaagaaacgccgcgcaacctctttggtttcaaggatggaacagcaaatgtcacgacggagaaggactttgataaggtcgtctggattgacagcaaggactggatgaagggtggttcctatatggctcttcgcctagtgcaaatgcacttggaaacttgggatcgaaccaatttgcaggagcaagaaaacacctttggtcgctacaaggagtccggtgctccctttggtaaaaccaacgaatttgatgaagtagatttatctaaactaccagttgattcacatgtccgtttagccaaagaagtcgatcgaccgattttacgccggtcatattcctattcggatggcatcaatgaacagactgggcaatttgatgccggcttgatctttatcgcgtttcaaaaggatccgaacagctttgtcaaaatccaaaccaacttgggcgcagtcgacaaaatgaacgagtacatcacccatatcggaagtggactctttgcttgctttgcaggtgttgagaaaggagggtatcttggtcaagcactctttgaataaattcttgatcttgttcggtcttcttgccttgttctggactcatccagtggctgcggagtcttatagcgatctctttatcaagattacagatgcaacaaccgctgtagaaaataagaaccaggataaggccaaggcattaatcgctgagattcaggctgcttttgaatccaaagaccaccatgattccaaggcagggaaaaaagttagccaagccttagctataaaaggggaggtaactaaagacgatctcaccaagatctcatcagccttgctcgcttttgaaaaagaacaaaatccggtcgatttagaggcggaaaaagacaaactcgtgagtcgcctcgctccttactttaagaacctacaagaggccattacggctaaggatctggatgaaactcgtcaaacctatgccgatctcaataatacctggacgcgaaacgaagcggtggtcagagatcacagcacagcctactatggtaaaatcgagacggccatttcgcttttgcgcagtagtattgaaacagagcctaccgattttaccaacatccagtcctcttatgatgacctcaaaaatgggattgatgcctttgtaaaaggagaagccattagcaatgccagtacggatttgacgttgaacgatgggatcaagcttttggagaaggcgcaaagccaattccaatccggcgacgataagtctgctgcagcgactatgaagcagtttatcaccatctggccaactatcgaaggggatgtcagcacgaccaatcccagtctctacacgcgcgtagagagcgaatccccggtcattatggtcaaggggaaagagaaggcctatcaagagaaattacaaggattgatcagagacctgtctgcgatcgatacgacagcttcttacaacgcctttgatgccatgttgattcttttgcgtgaaggagtagaagcccttctgatcgtcatggcacttgtgacgacccttaaggctgctaagatgaggaaaggccttaaatgggtttacggtggagctattgcgggtgttcttgccagtgcagcgattgctcttgttttgcaagtagcatttccagccgttacttcgggctctaaccgggaaatcatagaagggggcgttgggattttcgctgtagtcatgatgatcctcattgggatttggctccacagcaagtcctctgtcaaacagtggaatgcctttatggaccgtcagatgaagacggtaacggctacaggaagttttgtttctatgtttgccctcagtttcttagcagtctttcgtgaaggggctgagaccattctcttctatgttggaatcattccacgaattacaaccgtgaatttcttattaggaatcgggcttgccatagccgttctcatccttattgcagtggcgatgaccaaggccagtcaagccatccaacctcatcgaatctttttcattctgacgtggttgatttacgccttggccttcaagatgcttggtgtcagcatccacgccctacagttgaccaatatcctaccgagtcatttggtcaatggacttccaaccatcgattgggtagggatctatccaagctgggaagttcttcttcctcaactactctttgtggccctgatcgcccttatcacggtgagacaacatggcaaagagtagagcagataaaatgaccattgtcgagcacttggtcgaatttcgaaaacgattaattgcagtggtcttgtgttatattatcgtcttcatcgtagcctttgtatttggaggagaactctaccaaaccttaacagctagcctccatcaaaaactgctggtactagggccaaatgatatcctctggatctatgtatcgctggcaaatattacagcctttagcctgaccctgccctttattgtctaccagatttggcaatttgtaaggccggctctgaaggagaaggaggcgcgtgcagtctttgcttacatcccagctagctttatttgctttgtgctggggcttgcatttggttatttctttctcagcccagctattttagaggtcctgatgcgcttgggagaagggctgtttgatacccaattaacagcacaaaattatttaaccttcttatggcatactaccttgcctttaggggtcttgttcgagttaccagttttggtcgcttttctgacctcgattggacttttgacaccacagtttttaataacctaccgacgttacgcttactttgttctgctggtcttagccgtcgtgctaacccctgcagactttatcagtgacttggccatgacactccctttgatcctcttatttgaagtcagtgtcgccatcagtaaagtcatctattcaagaaaaaggagaaactaatgggaattttacgtgatattggagcaccaggattgatcatcatcatcctaggcgccctcttgatttttggaccaaaacgcctgcctgagttgggtcagtccatcggcaaaatgtttgctgaatttaagacagctgtcaacaaaggcagtgaagaagctgatcaagacgctaaagaagctaaagaagaaaaagaataatcagacaattttcaaaattctattgagttcgattgcataaaaaggtataataagacaagtacttgcaatcgacgaaggaggaaaccatgattattacgattttgtcactcattttctatttcagctatatcggattcttatgctggttggtcgtaaaaattgtcgaaaaattgttcaatttcttgttgaaccgttaatgaagaaacaatccatttcaccccgagtgagtggatttttttgtatcctgtttattcagatagagacactgtgggctctttttgtgtatctaattcccctagctagtgactaacttgatcttcaaactgtatttcggtatgatagtatggagtagaattacgattcagttgtgtagggctatttgaagaatgcatacaaagggctgtaaaataaattatccagtagtaattaatacagaagatatttttaaaattttttggtcacacaacacgaaaaaaagttccatataccaaaaggataaaaatgatgaaaagagattctatctttatagaagaaaaacttaatgaactaattaaatttaatgaaatgatgattaaggaatggttacaagagttagaccaacttaaccaaggaattaatccttataaacgtcccattgacgaagttattagactaactcaaagtgacatctcttattatcaggaaaaaaatatgatagccacctacactgcgggatattctattgagagattcaaagaagagtaccttaaatatatcgatagccttctccctatttggtatagtaattcaggatatgatgcaatgctctgggctctttccattggtattttgttagaggttgatgaaacgacttttgataaattggtagatttggtaagggaagatgatccagaggactatttgatcgattaccttatccagtctcgtcattcagagtggacaattcggataaactataatttcccaagaccttatggctttacccgaaagattatagaggaagaaaattctgaaaaggctgtatctctcttgaaagaatacttgactaaaaaatggtatcagggatgtagagatgaaggctggtatgatttgcataagcgcaacattgataattattatggctactggtcctttgagtcgggggctctctgcaagctcaagggcttggattataaacaattagaaggacttccatattttccatatgacttggttgcggaaggtggaatatatagacaatttatataaggacttagaaagaaggtagaattggaactaagagacacgttttcagataaaaataatatcaatggactaatccaagtttttcaaaaagccattcaagattctgaagaacgaattcaagcaattgaacaggatgagaaagaaggaatccaaaaattttctttggacaataaagatgtcatttcaaatataagatcatcaatatgtcggtaccaaaaagaagttatgatagcgacttatactgcggggttttctattgtagatttcaagggtcagtatattaagtatgtagagagtttgcaactatcttggcaaagcaattctggctatgaacagatggtatgggtgctttctattggtattttgttagagattgaggaaatgatttttgatcagttagtagacttggtcaaaaaagatgatccagaggactatttgatcgattacctcatccaatctcgtcatccagaatggacaattcgggtaaactataattttccaaaaccttatgggtttactagaaaaattattgaagaagaggattctgaacaggctctaaaattgcttaaaaaatatttggctaagaaatggtaccaagggagtagagatacaggatggtacaatttacataaaactaataacagaagttattatggttactggtccttcgaatcaggttctatttgcaaactcaagggattagattacaaggaattggaaggtgttccgtatttcccttatgatttggttgtggaaggaacgcaacaaaatgaactttaaggttgaaaaatgatggaagagaagattttaacaagagaagaagtgcttcaaaatggtgtttgttttgaagaagagcttgattggggtggatggtattgtgagcagattgtttctgagaatgaatctggcgaagaaattccatttacgggtttagcttatgatttatacccagatggtaaattagagtattatggttatattaaagatgggttccgtcatgggatgaatgtatgcttttatcctaatggaaatattgaaagtataaatcctcaagattgcggtgcagctgatgggcttcaaaagaaatactatgaaaacggcgcattaaaatcacggacatattgtgttataggggcgagagttacttatatcgagtacgatgaggctgaccatattatcgatgaaaaattagaaccgactgaggcagattttgagagagcaaagaagtggggtgttgatttatcaaaacgagacatgactttaaagtagaacaaaatcgcttgagatctcagattgatttaataaatcgttctgaagaggattaaagtcaaaagaccacggtttggtctttataaaggagacacaaaatgggtttacgagatactttgaatacggaagagaattataaagatggcttgatatcaaacaaagaagccttgctgtattttcaagaaaaattacgaaaacttcaaaatgatttagatgatggaatagaaaactataaaaagccaacgatcgaagtttataattcaactttagctactattttgtcctatcagagagatattttattagcaacttattctagtggagcctctttgtcagcatttaaagaggaatacatttcatttgtatcgtttctaattccaatttggcgtaaggaatggggctacgaacaaatgctatgggcgctttctattgggattcttttaaacattgatgaagagacttttaatcagttagtagacttggtcaaaaaagatgatccagaagattatctgattgattatctgattcaaactcgttatccagagtggacgattcggatcaactataattttcctaaaccttatggatatactcagaaaatcattgaagaagagaattctgaacaggcactaaaattgttaaaagaatatttggttaagaaatggtaccaagggagtagggatgctgcttggtatgatttacataagcaaaatgtaaaaaatcatgtaggctactggtcctttgagtcagccgctctttgcaaaattaaaggattggattacaaggaattggaaggtgtgccgtatctcccttatgatttggttgcgcaagtgagacggaagaataagtcttgtgatgtatgagtcattaaattaaaaaaagagaggaaataaattatgatcgggcctaagtacggtgaaaatattgttgttctttttaaacatgaaaataaatatacttggtatgtttcggatttagaattctggtatattgattatgaggtagcacgctattcacttgatactctgtatgatgagcgaaaacgttcttcgaaactgacccatgaaacattgccatatttcttagaagatatggaagcatacaaatgcgagctaaatgagctaggagaagcatttgctaaatcgtatcaagaagatagattgaacgcagtttatgattttaaaccttccttgtttattgatatggatgagatggaactgtactcgcagtacgcagaatacgtatcatttgaagaatatgtttcggaaccatggaaaggccaatataaatcattttgggataagattccagaagaagaaaaattctggttggaatgtggcaccgatgtatacagtgaagattgattacagttgtagaaaagagataggataaatactagtggataaagatcaattaataaacaagccagaaataaatattgttggggttattgtgaaccatcaatttaattggtacatttgttcaagcgatatgtggactatggatattgataaatatattcaggcttacaaggaagcgggtttggatcttgatttttcctatttacctgagattcaacagaaccttcatgtgattacaaaaagcaatcttgggacttatttagaaatgtataaaaatgactggctgaaggtaaccgttgaagagttgatcgcaatgataaaacgttcaatggaaggcgaagacttgaattcagagattattctggaaggaaaagccttgctcccggatcttttcatcgattttgataaagaggaattttattcaaaccatctagggatgaaaaactacgagagatatgtgccaaacggatggaaatttttttcaggaagttttgatcatttgatccccaaagagcaacaatattggattgaaaagactggcgctaaccaatgaagtaactaataataaaattaaaaaaggtaagaaacaatgaagcattattttattggtggccttggtggcaattgctaccatctggagtcacttatcgatgagcttggctttcctgtgacctttctagatccatacagggaaatgattcagaaaggaaaagatcttcgtgcttggtttcaaggtcagattgggcaagctgaagagatctgtttattggggcattctttgggtggagatttggctcgttacctagcctctgcgttccctcagatccaagttctgattctcttggacgggggctatctggatatggaaaagatcctgcctcttgaggaagagctagaaggtacatcgtccttcatgcagcagcaagtcttttcgacattggaagaagccgtattagcgaaattcggtgatggagcagatcctacgcctatagcgcgaaaagcattagaggctagctatcgctggaatccagcgagtgaacaatatgcattaaatctagatctagaaaaagtcttggccttattacgcttgagacgtagcatcaagactaaccagatttcactttcggacaagcccgtcctctttattggccctcgataccaagaagaacctgaatggaggaaagcagctctgaatcaactagatcccaagatcaagcaagtcttgctagaaggcttggggcacgaactgtatacagaggcaccagaaattgtagctagagaaatcaacaattggcttcaaaatgttcataaataaaacctgtttctctttttgaaacgggtttttgtcttgtaatttccgaacattgtttcctataaaatcattcccgttgcattaggtccgtatctttggtataatctatcaaggaaacgtcaagagacgtagcgatgcgcttgcgcataggtaggtcagtttttagaaaagagatttttcaatctatgttaaatgaatttcctattttcgactatgaagatattcagttgattcccaacaaatgtatcatcaatagccggtcagaagcagatacaaccgttcaatttggaaaccataccttcaagcttccagtcgttcctgccaatatgcagacaatcttggatgagaatgtagcagagcagttggcgcgtggtggttacttctacatcatgcaccgttttgatgaagcgggtcggattccttttgtcaaacgcatgcatgatcaaggtttgatcgcttccatttcggttggtgttaaggaatacgaatacgactttgtgagtcaattaaaggcagatgcgcctgagtacatcactattgatatcgcacacggtcatgcggatagtgtcattcggatgattcaacatatcaagaaagaattgccagatacctttgtcattgctggaaatgttggaacacctgaagctgttcgtgaattggaaaatgcgggagctgatgcgactaaggtcgggatcggccctggtaaggtttgtatcaccaaagtgaagactggatttggtacaggtggttggcaattggctgctcttcgctggtgctcaaaagcagcgcgtaagccaatcattgcggatggtggtattcggactcatggtgatattgccaaatcgattcgtttcggggcatctatggtcatgatcggttctctctttgcaggacatattgaaagtcctggtaaaacagtagagattgatggagagtctttcaaagagtactatggatctgcttcagagtaccaaaaaggcgcttataagaacgtcgaagggaagaagattttattgcctgccaagggtcatttacaagacaccctgacagaaatggaacaagatttgcaaagttcgatctcgtatgcaggaggccgaaaattagcagatttgaaacacgttgactatgtgatcgttaagaattctatctggaatggcgatgcacactaattgaattacttatttatttcacgaatgggcgtgatgtttctacaaggtgccggaacacctaacaataagtaagtcgggatcatttctctttctagagagatttcagggcttgcttagcaggcctttttgttttttgtgaatgaagtagaggattttaaaaaaagtaggaggaagtatgaaattactggaagagcgcatcttaaaagatggcaatgttttaggtgagaatatcctcaaggtggactcctttttgacccaccaagtggattttaaactcatgaaagaaattggtcagacttttgctgaccggttcaaagatgctggcgtgacgaaagtcgtgaccattgaagcgtctggaattgcacctgccctttatgtagctgaagccttggatgttcccatgatctttgctaaaaaggcgaaaaacatcacgatgaatgagggcatcttgacggctgaggtttattcctttaccaagcaagtgaccagcaccgtttcgattgcaggtaaatttttggatccatcagataaggttttgatcattgacgatttcctcgcaaatggtcaagcagccaaaggattgattcaaatcatcgaacaagccggggctcaagtcgaagcgattgggatcgtgattgaaaaatccttccaagatggacggggattgttagaagagttgggatatccagttgtatccctcgcacgtttggaccgttttgaaaatggtcaggttgtatttaaggaggcagacatctaatgcaaaaacaagaaagccattcacaggcggccattctaggcttgcaacaccttttagccatgtattcgggatctattttggtgccgatcatgatcgcaggagctttgggctataatgctcatcaactaacctatctcatctctacagatatcttcatgtgcggggtagcaactttccttcaagtgcagctcaataaatactttgggatcggacttccggtagtccttggggttgccttccagtctgtggcacctctcagcatgatcggggctagccatggtagtggtgccatgtttggtgccttgattgtctcagggatttatgtcatccttgtctctggtttcttctctaagattgccaatctcttcccatctattgtaacgggatctgttattacaaccattggtttgactttgattccagtagcgattggaaatatgggaaataatgcgccaaaaccaaccgttcaaagcttgattttggctgtggtgaccattctcatcattttagttgttaatatctatacgactggttttattaaatctatttcaattttgattggtttgatcgcagggactgccattgcagcttccatgggcttggtagacttcacacctgtggctcaagcaccagtcgttcacgttccaacgcctttcttctttggagctcctaagtttgaaatcacctcaatcgtcatgatgtgtatcatcgcgacagtttctatggttgaatcaactggtgtctatcttgcactttctgatattactaaagatccaattaatagcacgcgccttcgcaatggttaccgcgctgaagggttggccgttctcctcggtggtatcttcaacaccttcccttacaccggattctcacaaaacgttggcttggtgaaattgtctggtatcaagactcgtcttccaatctactatgcggctggtttccttgttcttcttggtctccttcctaagtttggagctttggcacaaatcattccaagtccagttcttgggggagcgatgcttgtcatgtttggttttgtatcgattcaagggatgcagatccttgcgcgtgttgattttgaacacaatgagcacaatttcttgatcgctgctgtatcgattgctgcaggggttggtttgaacaacagcaccctctttaatggccttccaacaggattccaaatgttctttgctaacggaattgttgttgccagtgtcttggcgatcgttctcaatgctattttaaaccgcaacaaaaactaatctcacatgaaccggaggtccttggatcttcggtttttttgacttttaaggaaacatatagtagagtggaagaggagagaatcttatttgaagagaagagagttagaattatgtatttaacctatcactttaaagagcgcttgcgcttgtttttgagtctatttttgccgattttgatctaccaattggccaattattcagccagctttgtcgatacagccatgaccggtcagtaccggacccttgatttggctggtgtttctacagctaccagtctgtggaatccattttttacttttctgaccgggattgtctctgcactgacgccgattgttgggcatcatttaggcaagggaaataaagaacggattgctggcgatttttaccaattcctctatatgtcatttggtatggctattctcttaataggctttgtttgggggattgcacccatgattctcaagcagatcggtttagaaaatgttgttgcccaaatagccattcgctatttatattttctttctctgggaatcttacccttgttgctctttagtatcgtgcggaccttccttgataccttaggaatgacgcgtctatccatgtacttgatgctcttgcttttgcctctcaatgcttgttttaactatatcctgatctatggggcttttggttttcctgagatggggggagcaggagcaggtcttggaacctctctggcctactgggtcttgctggttattgcggttttgattttgtgcaagcatcccaaggtagcacctttccaattgtggaagccacagccttatgattttaaagggatgaaagaagtattgcggcttgggcttccaatcggtggaattgtttttgcagaagtcatcatcttctcgctggttggtttgttaatggcaaaatttccatcacttaccattgcgagtcaccaatcggccatgaatttttctaccctgatgtatgctttcccagttagtatctccagtactatggctattatcgtttcttacgaactgggagcaggaagaccagaagtcgtcaaacaatactgccgtttgggccggctgacagcatttggttttgcgattgtcaccctcgtctttctctatacatttcgctttcaactagcaggactatatggcaaggatccaatctttgtgcaacaaacagcgattttcatgacctatagcctctttttccaagtagccgataccttcgcagcaccccttcaagggattttgcggggctataaggatacaaccgtccctttcttattaggtgtctttagttattggtgcatctctatcccactagggattttccttgaccatgtgaccaacctcggtccctatgcttattggattggccttatttctagccttgtcgtgagtggaatttgttaccaacttcggctctggcagatcgaaaaaaaacaaacaaactaaaatgaagtctgggaaaccaggctttttatgtaccgtgaatattataaattttctgaaagttcttgacaattgatgtcaaagtggtaagattaggaggtagaaatgaagatctagaaggagaacgagatgagaagtgatatgatcaaaatggggatcgaccgagcaccagcgcgtggtctcctctatgcaactgggcaagtaaaatcagcaaaggatatgcaaaagccctttattgccatttgtaactcctatattgatatcgttccaggacatgttcacctgcgtgagttagcggatgttgctaaggaagctattcgcgaggctggtgggattccttttgaatttaataccatcggtgtcgatgacggaatcgctatggggcatatcgggatgcgttatagtttgccatctcgtgagttgatcgcagatgctgctgaaacagtcatcaatgcccactggtttgatggtgttttctatattcccaactgtgataagattacaccaggtatgattttggcagccatgcggaccaatgtaccagccgtattttgttctggtggacccatgaagggcggcgttgacatgacgggacatcaggcaactctctcaagtttgtttgaagctgtaggtacttatcaagctggtgatatgagcatggatgagctggatttcttggaaaaaaatgcctgcccaacttgtggctcttgctctggtatgtttactgccaattccatgaactgtttgatggaagtattaggtcttgctcttcctggaaatggtaccatcttagctgtttcagatgaacgccgggaattggttcgccaagcggccaaacaattggtagagaatattaaaaaggatatccgtccacgggatattgtgaccaaagaagccatcgacgatgcttttgcgctcgatatggccatgggtggttctactaatactgtgcttcatacgctcgctattgcgcgtgaagcagggattgactatgatctcaaagatatcaacgagattgccaagaagacaccttatctttctaaaattgcaccttcaagtgtttacaccatgcatgatgtgcatgaagctggtggtgttccagccattatcaatcagttgattaaaaaaggtgccattaagggtgatcgtattacagttactggtaaaaccttgaaagaaaacgtagctggtgccgaaattaaaaatgaagaaattatccatccaattgagcatcctatttcacctgtaggtggtttgtcgatcctctacggaaatattgctcaggatggagcggttatcaaggtcggtggggtcgatccatctgtgaccactttccgtgggaaggccatctgctgcgattcacaagatcaagcccttgagttgattgacaatggaacagtcaagaagggacatgtcgttgtcattcgttacgagggtcctcagggtggacctggtatgccagagatgctagctccaacctctaagattgtcggacgcggtcttggtaaggatgtggcactgattacggatggtcgtttctcaggagctactcgtgggattgcgattggtcacgtttctccagaagcagcagaaggtggaaatatcgccttaattgaagatggggatgacatcgtgattgaccttccaaatcgtacccttgatttgcttgtcgatgatgcaacgcttgaagaacgccgtaaacacttgaaacctttcaaatctaagatttcaagtggatggttgcgccgttacactgcttttgctaaatcagctaatgtcggtggaactctgatgagtgatgaagaattcgaagaacgtaaagcagaacgtcaagcacaagaaaaataagaaaaaccctttcctgctatgtgttatcacaagcaagaaagggttttttagtggaaatattatttggtgcgcatttcaccttgagggaagtaggttccttcaggcatatcattaatgataacgtgaacagctgactgaggagcaccagtattgcggacaacagcctccgttacttctttggcgagggctttcttttgttccaaagtgcgtccttcaaatagatcaattcgtacaaatggcatagggccacctcctaaattttttataggactattttatcacattttgggatacaaaggtcagcaaaattatggtaaaatgataatgaaacacattttagagagaacagaaggaaaatggcacaattatattataaatatgggaccatgaactcaggtaaaaccattgagattttgaaggtggcccataattatgaagagcaaggcaaaagcgtcgttatcatgacctcagcaatcgatacgcgcgatggatttggagtggtttctagccggattggtatgaaacgggaagccgttgcgatcgaagacgaaaccgatatctttggctttattaaaaaccaagcaatcaaaccttactgtgtcttaatcgatgaagctcagtttttgaaacgccaccatgtctatgatctggcaagagtcgtggatgaactggatgtgccggtgatggcttttggcctcaaaaatgattttcgaaatgaactctttgaaggttctaaacacctcctcttgttagcggacaagatcgaggaaatcaaaaccatttgccaatactgttcccgaaaggcgaccatggtcttgcgcacccaagcgggcaaacctgtctacgacggagagcagatccagattggtggacacgagacctatatctcggtttgccgcaagcattattttaatccggacatactaactgaaagcgtctagaacgttttagagaggttaataatgtctatttgtttaaaagatattacaatagaaaattattttgacgttttaaatctagaagttcatccaaaccaaaggaattttattgcatccaattccgttagtttagctgaagcctatgtatatgataaaaatggtgattttatagctcccttagcagtttatgataaggaagtattagttggttttgttatgattgcctatgaccggaaaattgggatcagtaagggggactacttgttatttcgttttatgatcgataaacgatttcaaggtttaggctattttaaaccgactatggatgcagtcattgactttgttcgaacagagccagctggaaaagcaacaagtctttggttatcttatgaaccggaaaataatcaagcgagatcttgctatctccattatggatttaaagaaactggccaagtcatagaagacgaaattgtagcaatctatgatctaacaacctagaattaaggagcaaacatgaatatctatgatcaactacaagctgtagaagaccgttatgaagagttaggggagttattgagtgacccagatgtggtctctgataccaaacgctttatggagctttcaaaagaagaggcttccactcgtgacacggtgacagcttaccgggaatacaagcaagtgcttcaaaatatcgtcgatgctgaagaaatgatcaaggaagcaggtggcgatgcagatttggaagaaatggccaagcaagagctgaaagatgccaaggctgaaaaagaagagtacgaagaaaaattgaaaatcttacttcttccaaaagatccaaacgatgacaagaacattatcttggaaattcgtggggcagcaggaggagacgaagcacagttgtttgctggtgacctcttgcagatgtaccaaaaatacgcggaaagccaaggttggcgctttgaggtcatggaagcttcctacaatggcgttggtgggatcaaagaagtagtggccatggtttctggtcaatcagtctactcgaaactcaagtatgaatctggtgcccaccgggtacaacgggtccctgtgactgaaagccaaggtcgtgtccatacctctacagcaaccgttctggtcatgccagaaattgaagaagttgagtacgacattgatccaaaagaccttcggattgacatctaccacgcttctggtgcgggtggacagaacgtcaataaggttgcgacagctgttcgtattgtccacttgccaaccaatatcaaggtagagatgcaggaagaacggacccaacagaagaaccgtgaaaaagccatgaagatcattcgtgcgcgtgtggctgaccacttcgctcagattgcccaagacgagcaggacgctgagcggaagtcaactatcgggactggtgaccgttcagagcggatccggacttacaacttccctcaaaaccgtgtgaccgatcaccggattggcttgacccttcaaaaactggatactatcttatctggtaaattagatgaagtggtcgatgctttggtcttgtatgatcaaacacaaaaactagaagagttgaataaataatgttgttgggatcattattagcccagtatgaagaagaattaatagccgttggagaggaagcagaaagcctctccttcgcgtatcgtgctttaaaaaactggacctttacagactttgtccttgctttgcaaaaagaagtggaagtagaggatcaggccttgcttctatccatctttgagcagttgaaacatcacatccctgcccaatatattattggcagcgcagaattttgtggccatgtttttacagttgatgagcgcgtgctgattccacgcccagagactgaggagttggtcgctctcatacttgaggaaaacgatggggaagccttacgagttctggatattggaacaggaagtggtgccattgctattagcatagcccttgctagacctaactggcagattcaagctagtgatgtctcagaggaggccttagcccttgctcatgaaaatgcccagcagttagaagcagtcgtttcctttaagtcttcagatgtactagatgatctagaaggtccatacgacctgattgtttccaatccaccctatatctcgcgtgatgatgtagaagaagttggagccaatgtattagcctctgaacctcacttagctctctttgcagaccgtgatggatatgctatctacgaaaagattgcccggcaagcaccaagtgttttaacaccagaagcgaaggtctatctagagatcggctataagcaaggtaacaaagtaaaagagctctttcaaaaggcatttcccgacaaacaagttcgagttttgaaagaccaatttggacaagatagaatggtagtagtagacaatggatcacattgagaaagaattagaagcaggacgtgcggttattctgccaactgaaacagtctatggtattttcgctaaagctttggatcaagaggcagttgattatatttacgaattaaaacgtagatctagagagaaagccctgaacttgaatgtagcaaatgaagaaggtgttcgaatttattcgaaaaatcaacctagctatttaacaaaactgattgattcatttttacctgggcctttaactattattcttcaagcaaatgaaaaggtgcctgactggattcattcagggatgtctacggttggctttcggatgccagcccatccaaagaccttggaattaattcgtaaatatggtcctttagttggtccttctgcaaatctatctggacacgctagcggaacaaagtatgaagctattataaaagaatttgatcaggtaattcctggctttgaggatgatgctttccttactggccaagattcgactatcctagatatttctggggccaaagcgaggattttacgacaaggttctattacgaaagctgacttgcttgcacaagtgcccgagctttcttttgaggaagataaccttcctctgtcataatgtatataaaaaattatttaataaggagtagacctatgatttttgataaagaagattacaaagcctatgatgcagacctatggaatgctatttccaaagaagaggaacgccaacaaaacaatatcgagttgattgcttctgaaaatgttgtctctaaggcagtgatggctgctcaagggtctattcttacaaataagtatgccgaaggctatcctggtcgtcgttactacggcgggacagatgtggtcgatgtggttgaaagcttagccatcgaacgtgctaaggaaatctttggagctaagtacgctaatgttcaaccgcattcaggaagtcaggccaactgcgccgcctatatggccttgattgagcctggcgatacagttatggggatggatttggctgctggtggacatttgacacacggagcttctgtaagcttctcagggcaaacatataactttgtgtcctacagcgtggatcctgaaacagaactcttggattttgacgccatcttaaaacaagcccaagaagtgaagccaaaactcatcgttgctggtgcctcagcctactctcagattattgatttctcaaaattccgtgagattgcggatgcagtaggagccaagctcatggttgacatggcccatattgctggtctagtagcagcaggtcttcatccaagtccagttccttatgcccatatcacgactacgaccactcacaagacccttcgtggccctcgtggaggcctaatcttgaccaatgacgaggaattggctaagaaaattaactctgctattttccctggtattcaaggaggaccgttggagcatgtcattgcagccaaagctgtcgctttcaaagaagcgctggatcctgcctttaaagaatatgcagctaacgtgattaagaacagtcaggccatggctgatgtcttcttgcaagatcctgatttccgtgtcatttcaggcggaacagagaaccaccttttccttgtcgacgtcaccaaagtcgttgaaaatgggaaagtagcgcaaaacttgttggatgaagtcaatatcaccctcaacaagaactctattccttatgaaaccttgtctccatttaagaccagtgggattcggattggtgcagcagctatcaccgctcgtggttttggtgaaaaagaaagtcgcaccgttgctgaactcatgatcaaagcgctgaagaatgcggataatcaagaagtattagacgaagtgcgtagccaagtcaaagccttgacagacgcctttccactttacgaggactaaaccatcttatggatatttacgtaaaaaaagccatcattcatcaatttagcccagacgataccgatctctatctggcagataaatttctcaatatcacgcctaaaatcgaggaatacttgcgtaagaagattgaacgggtctactcggatgaagccagaaccggtattttcgaagaggacaatccttttcttgagatgatctcagatgacctattagaaacttcggtcgcagtagcgaatcgctggaaggaagaatttgtcgtctctgagaatcaaaagaccaacgatttggtgttcattcaattctcaaaagaaggggtggaccactttgcctttcttcggattgccttacgggaaaccttgacgcatcttggcggtgaagtggacaatccgatcaagttgacgcaaaataatctgcctggctttggaactggtgctgatgaagctttggtcatcaatcttcaaagccgcaaataccacttgattgaaaaacggatcaagtacaacgggactttcttgaactatttttctgagaatctgttgcaggcgcaacctaagatctcgcctaaaaagtcgatcaaagcactagaaaaaacagcccaacgtattgcggaaagctttaacacagatgattttcaatttcaatcaaaggttaaatcagcaatttttaactatattgaggaagaaaataaactctctcctgagaaattagcggatgatctcttcgatgataatctgacagcccgcctcagttttattgaccaagtcaaagaagctgtacctgagccagtcacttttgaagaaattgatgcatctcgccagttgaagaagttcgaaaatcagaaattgtcattgtcaaatggaattgaactgattgttccgaataatgtctatgaagatgcagaatctgttgaatttattctaaacgataacgggacctattctattttgatcaaaaatattgaggatatacagagtaaataatgattaaacgtatagtgaagatcttcttattcatcttactaatatttggaatctacaagggaattcagatccaccatgatgtcaaacaagtcatgcagtaccgctccctggttagagaagtccttgctgaagaggacaccacggccaatgaaaacctcattcttgctatgatctatactgagaccaaaggtcgagaggacgatgtcatgcaggcaagtgagagtgcaagtggtgaaaccaataccattagtgataataaggccagtattcgccaaggtattcagactctttcagatgagttaaaagaagccaagaaaaaaggcgttgatagctggacagccgttcaagcctataatttcgggaaagactacattgattatgtggctaaacacggtgggacaaattccctagagttggcccgagcttattcacgggatgtagtagcgccaagccttggcaatgtaaccggtgaaacttatctttacctccaccctatttccctattaaatgggatggaactctacatcaatggcggaaatatttattattctcgtttagtagaaaccaatatgacaattatgaagttattttcatggttttaatcaatcaagttagagagagttggacagaaatcggtcattcgttagaattcgatttcgtcgtcccacctccgcacagttgagtagggctgtaaaagctaatgaaatcagcgtagtagagcctactcaaccgctgcaacaatccaaaaacaattgagaggctgggacttttgtcccagcctctcttataatctataaatctttttgtgtattctgacttttgattcttagtattttgaaatcattgaatagctatgataaaatactagttagttttaaattatcttgaggtgtttctattgaacaaaaaatcaatctacgggctatttcttgggctgattctcctatgtatcgcttttttggggaagtcacaacaaaaaacgcagctggaccacactaattacctacaaaatactcgtcctaccttattttttcatggttatggctcgagtgccaatgcagaaaaacacatgacagatgcggcaaaaaaggcaggggttactgagaccgtcattactgcaaacgtgtctaccgatggacaagtaaagctgacagggaccattcccaaaggtgcggtcaatccaattatcaaagtggaataccaaaacaatcgcacgcccgatccaaaagtcatcagccattatgcctatcaggtagttaaaaaacttcaagatacctaccattttaaagagatgaacgtcgtcgctcattctatgggaaatatgtccgtcttatattatcttctggaacatggaagtgatgagaatctgccaaaaattgtcaagcaggtcgccattgccaaccatgtcgctggactcgaagggatgaatttaccacaaggtttggttctagatacgcaaactggtaaaccctccgcaatgaatgagcagtaccaacagcttttaggtcttcgggaagtctatccagaaaatcagatcgatgtactgaatatctatggagatatcggtggagaaactgatggatcggttctcaatgtttcttcaaaagcccttcgttacctagtagcagaacgtgcaaaaagctaccgtgaagaacagattgatggcaaaggtgctcagcacagccaacttcatgaaaatccaatagtagataagttgttgatccagtttctttggggaaaataaatatgtcatcctttcttaaaagaaatgtaagcttcttttaagaaagaaacgatataataaacattgaagtgaataactcttttattggcttctttttttcagctctagtcaggtgaaatagtcgataaaatctactcagcgtggatatgagatagaaagaagagagaaatgaaattaagaaaaattgctttatttgtggcgtcgacagttgccctctttagtggaattccacatgtttctgcagatagcaatgtccagaaagtcattgatgaaacttatgtcaaaccagactatgttttggggtattctctagaccaaatgcagattgagcaaaccttgaatttgctgaactatgatagttcaaaagacaaagaagagtggaagactatgacaccagaggtctactcttcgattatgaacgttgcgaacgatgatagtctagagctctattcctctgttaaaattcaaaaattaggtaagaacaagcctctagaagtgaatattgtgacgcctcaaaacatcaccaaggttactgcagatatgtatcggaatgcggccgttacacttggtttggagcatgctcaaattacagtcgcatctcctgtccaagtaactggtgaaagtgccttggctggtatctattactcgcttgagaaaaatggtgccaaagtttctcaagaaagcaaagatctggctcaagaagaattaaagactctatccgggatcaatgaagaaaatgccggaaagaaaaacttcgatgctgataaattgaacgtggcattgaccgacataaaaacggcagtagccaatgccaaacagaacaatcaggatttaagcaaggatgatattcgaaagattgtcgaagaaaccctgaaaaattataagttagatacaacggtgacaggcaaccagattaatttgatcgtgaatttcgcagtgaatctttcaaagagtagcgtcatcagcagcaaaagctttactaaaaccttgtcggatctaaaagatagtatcgtagacaaggcaggtgatacctttaacaatatcaatctcaattttgatacaaatgccattttaaaagatagtggaaacttcttcacaaatgcgtggaatgccattgctggcttcttcggagccatctggaatgccattgtcaaattctttagtagtttggttggataaacatagcacaaaagcactgctgacaagaagtcagagtgctttttgcgtttgattacctatttttagaactgctaaattcttattttaagctagttaatcaaggtcccacggaccttaaacttgctctattattttatgctcatgaaaaaaggtcccacggaccttttttttattcccactctacagttgcaggtggtttacttgtgatatcatagacgatgcggttaacgtggtcaacttcgtttacgatacggactgagattttttggagaacttcccaaggaattttagcgaagtcagctgtcattccatcgatagaagtgatagcgcggatagcgatagtgtagtcgtaagtacggccgtctcccataacacctactgaacgaacgccagtgttaacagtgaagtattgccagatatcgcggtcaagaccagctttagcgatttcttcacgaaggatagcgtctgattcacggactgtttcgagtttttcttcagtgatttcccccatgacacggatggcaagacctggtcctgggaatggttggcgccatacgatgtgatctggcatgccaagctcggtaccaagggcacgaacttcatctttgtaaagagtgttcagtggctcgatcagttcaaactgcatgtcttcaggaagtccaccaacgttgtggtgagatttgatggtttgagcagtatctgtaccagattcgatcacatcagtgtaaagagttccttgtgccaagaatttcacatcttttagtttgcttgcttcatcgtcaaagacatagacaaattcgttcccaatgatcttgcgtttttgttcgggatcagacacaccagccaatttatcaaggaaacgtttagcagcgtctgctttaacaatgttcaaaccaaacttgccaccaagcatctccataacttgatcagcttcccctttacgaagaagaccgtggtctacaaagatacagatcaattgatctccgatagctttttggagaagaaccccaacaacggaagagtcaacaccacctgaaaggccaagaaggacacgtttgtctccgacggtttcacggatttttttgatctgcatgtcaatgaagttgtccatggtccagtcacctttagccccacagatgttcaaggcaaagttacgcaagatatcataaccgtgaacagagtgacgaacctcagggtggaattggattccgtagattttcttgtctggattttcaatggatgcaaatggacagtcagcagaagtaccagtgcggataaagtcagccggaatttctgtaacagcatctccgtgactcatcaagaccaattgtttgtctggtgtgccagcaaaaagagcggaagattctgtcaaagtcagttcagattgaccatattcacggttaccagcgtcacctgctggaacgaccttcccacccaatttatgggtcaacaattgcattccgtaacagattccaaggattggaataccgagttcaaaaatttcaggatcgatatcaaaagacccttcctcgtatactgagtttggtccgcctgaaagaacgatcccaactggattgattgcacgaacttcatcagcagaaatcttatggctcttcaattctgagaagacaccaatttcacgaattcgacgtgaaataagctgattgtattggctaccgtagtcaagcacaatgattttttcaacatcatgcaaatcagttgataggtttgtcatcttatccccttcttatagaaatttactttcctctattctaacacaaatgccttgtctttaccaatctctgattgaagaattaggaattttacgctacaatagaagtaacacagagaaagagcaatgttatgattccagcttacattcaaattcatgatcagattaaatctgagattgatcaaaaaatatggaaaattggagagcggctccccagtgaacgcgatctagctgaaaaattccaggtgagtcggatgactcttaggcaggccattacccttctggtcgaagaaggagtacttgaaagacgggtaggaagtggtacctttatcactagcacgcgcgtccaagaaaaaatgcgcggaacaaccagttttactgagattatgaaatcgcaaggtaaggaaccttctagtcaagtgatttcttaccgtaaaaccattcctagcctccaagaagtggataaattaggcatcgataagacagacaccatcattcggatggagcgggtccggtacgcggatgggatccctgtcgtttatgaagtggcttccattccagagaaatttattaagaatttcaatcgcgaagaggtcaccagtcatttcttccaaaccttggagcgtcatggttataagatcggaaagtcgcatcagaccatctatgcgcgattagccaaagataagattgcggactatttgcagatttcaaaaggacaggctattttaggattgacacaggtttcctattttgaagacgggacggcttttgagtatgtgaaaagccagtatgtcggcgaacggttcgaattttatttggaaaacaattaagcgaacaatgaacagaaatagaaaactcttcaaatgtccgaggcatattaccagggcatttgggagcttttttagtgagaactcattctttctaaatagtgatagtatggtcataaataaaagatttgaaaaaaattttaaaaaattttttttttcttcaatttttgattttttttacgaattaatagatagaagctagttttagatctaaaaaaagatataaggcaggaaaaaaatgaaaaaaattaaaattgatgtggtagctgttcccttgagtgggcatctgtacccaactttaaatctcgttaaacccttattagatgatccaactatggaaatccgagttttcacgggtcctcagaaaaaagccgtcgcagaaagtctcggcttcacagtcgttccgattctagaggacaaagtagaagagtttgaacgtgcggctaataacgataagaaactcaatctcttttcagcttatcggcaattgtctaggagtcttgatttgatgaatcatgtatcggatcaattgctagaggagtggcgtgtcaatcgtccagatattgtcattgctgactttatcactctatcagctggttttgtggcagaacagttagaaattccttggattaccaccatggcgacccaatttgcaatcgaaactccttatggtcctccttgcttcttcggagggatgggagtcgcgcgcacaaagaaggaagagaagatccaagcactatgccgtaaactcacgcgcattggaaaatactgtggcgccttcctcttacgcaaacgcttaaaacgttacaatttcaagttgtacaatcaaaatggagtggagaccatctactctccttatgccatctttggaattggtatgatggagcttgagttgaaaacacatttccctcatcaatatgcctggcttggccctttggggacttctcttgaaaaagctgaagattatcctttagatctccgtccttacgacgacaagacgaaggtactcgtgacatgtggaacccagttgccttgggcaaaggagaatttgctagaacaaaccaagcatttggccaaagagcatccagaatgtcactttttcgtcaccttaggtgatggggcaaaagacttttctgaagaagaagtagcaccaaatgtgacggttgtctcatatctgccctacaaagaacatattccgcagatggactatgtcattcatcatggaggagctggaatcttttatcaatgtatcgaatttaaaaaaccagccttgatcttgccacatgattatgaccaatttgactatgcgattcgaggagtagaagcaggaattgcttttcaagcacatcgtaatcgcaccgaagagattcaagcaggttttaatgccctattagaaaaagaatcttgggaaaagttagaaagactaaacaaactttcaaaaacctacaagccgttggataccttggagtttgagattcaacgattattaagacgtggaacggatgggaaactatgaaaattcttgtaacaggtgcgactggcttccttggaaaatacgtgatcgatgagttgttggctcacgattattccattgtagcctttggccgaaatgaaaaaattgggaaggccctggaaaatgagcgcgtccaatttgtgaaaggggatttgagctctattgaggaattaaaacaagcctttcagtctgttgatgctgtggttcacgctggagctttatccactgcctggggaccttggaaggccttctatcaggcgaatgtagttggtactcaaaatgtccttgacttgtgccgtgaatatgcggtaaaacgcttggtttatgtttcttctcctagtatttacgcagctggaaaagatcaattaaacatcaaggaaagtgatgctccaaaagaaaatcacctcaacaattacatccgaagcaaattggcatctgaaaaacttttttctgattatccagatgtgccaagtatcatcttgcgtcctagaggattatttggtgtgggggataccagcattttgcctcgtgtcttacgcctcagtcgaaaaattggaattcctttgattcgaggaggagagcagctcatggatatgacctgtgtggaaaatgtcgccctagccattcgcttggctctggaagcaaaagaagctcacggacaagtttataatattacaaatggggaaccaaagacctttaagtatttgatcgaaaccacactaaagggattgggagagccgattcgctatcggaaacttccagcaggtctcctagcaggtatggcgtacagtcttgaaggggtgtatcgattctttcatatgaaggctgaacccccgttgacgcgctacacctattatcttcttcgctatagccaaactctcgatattcaaaaggctcaaactgaacttggctactatcccaaaatgaccattgaagaagggattgacaactatgtccaacatgatcaagcacattgattattttccagcaggctattgcagcagtcattctggtctcttatttaaagggattccgaatgaaaaaatgcaatttccagcaggtgtctttttgattcatcaccgtgaaaaaggctatattttgtacgataccggctatcactacgagattaagaaaaaagcacggtatttctggtaccgtctagccaccccaatgcagatgaaaaaagaagaccagatcgattatttattgcaagagcgtgggattgatccagcagaaattacttatgtgattctttctcatttgcaccctgatcatctcggtggagcagccctttttccaaatgctcatttctttgttacccaggaagtctatgaggtgtaccaaaaaccgaaatttaaagatctaatttttaaagagtttttgccagctgatttcaaggatcgggtgacttatctcaaagcaaatcaaaggcatcctgctttcccttaccgcccgactgcggatctttttggggatgggagcattcttgtttcgtccatcgatgggcatgcgagagggcaaggctgtctttatctggatgagctcaagctctttattggagcagatctttcttggggagtagacctcttgccttacacagggcaaatgcgtctcattccatccttggttcaggatgataagaaggcttatcttaaaggagctgatttgctggaaacactcttacaagatggtattcaagttgttgtcagccacgacccgcaagatcggattgaaaggattttaaatgaaaaaaacagtctttctgaaaacctttattgaaaccagatggtgccaccgattccgttctaaggaggccttgaagcgataccaagataaacaattggcacgctaccttgcatttatcacttctcaatccccctattttcaaacccattctcccgaatcctttggaaccatggataaaaccttcatgatgacacatttcaatgaactcaataccctgggagtggatcgagatcaggctttagagatggcgattcgcggagaacaaacacgagtttttactgagatgaatggagaagtagcagtgggcttgtcttcggggacttccggccaccgaggagtctttgtcaccacagaaaaagaaagaagtatgtgggctgcagcgattctagccaagatgctaccgaaaggaaaactgtttggtcatcgcattgcctttttcttacgagcggacaatgaactctatcaaaccattaattcaggccttattcgcttggaatattttgatattttcaaggatagcaaggagcatttagagcgactcaaagactatcaaccaaccattgtggtcgcaccagcttcaaccttgattgagttagccaactatgtcagcaatcagcaacttgcgattcaacccgtcaaggtcgtttctgtcgcagagatcctagaagatcgagatgcacagaccatcgccaaagcttttcaactagacaaggttgatcaggtctaccaagcgacagagggatttctagcttgtacctgttcagaaggcaatctacatctcaacgaagatattttgtctgtcgaaaaagagtatcttgatgatagccgcttttatccgattattacggatttcaaacgaaccagtcaacctatctatcgctaccgcctcaatgatattttggtggaagaaaagtctccttgcccttgtggttccgtctttactcgaatcgcaaagatcgaaggacgatcggacgatatcttctatttcaataaagaagatggcagtagccagataatctatccggattttattcgacggtgcattctctttgtcgaaaatattcaggactatcaagtaactcagttggcagatggatccattaccattgccttgagtcaccggacagagtctatggagcaagcgatctttgctcaatttgaactcttagctcagcaaaaacaattcattctcccaagtattcaatttatcgattaccaatgggacccaacacgtaaattaaaacgtgttcaacgacttcaataaaaggagaatcctatgactactgtaaaaagacatttgcaaattaaaggctatggaacagcgcttccagctcataccgtaactttcaaagaccagactcgttaccgcgtgaaagaaggagaagaaacacagattgatcttgcagcgcgtgcgattgaagtggctttaaaccatgcggggcttgaaatggcagacatcgactgcctggtttcggctagtgcggttggagttcagcccattccttgtacagctgctttgatccatgagcgcgtggccaagggactgacgattcctgccatggatatcaatactacctgtaccagttttgtatcagccttaagcaccatttcttatctgattgaaggtggagaataccaacgggtgctgattgtatccagtgaagtaggaagcctagggcttaatcccaaacaaaaagaaagctttgaactgtttagcgatggagccgcagcttttatttttgaagcaacaaaagaagataaaggaatcattgctagcatgcaacgtacctggtcagagggagcccatgataccgagattcgtggtggtttgacagcttatcatccgaaattatactctgaagcaaccaagaccgatttcatgtttgacatgaaagggaagaagatccttttgctttctgcccgtgttattccagaaatgttccaagaattcgaagagaaatcaggcatttctaaaggtgctgtagattatattattccccatcaagctagccgggccttgccactcgtcatggacaaattgggagttggcaaagacaagtatctcaatattgtcagtgattatggaaatatggtttcagtagccgtgcctttcggcctagcctatgcattggatcatggctatgtgaaggaaggagataccatcttcttgatgggaactgcagcagggatgacggtcaatatgttggcactgaaactctgatgatgaatcctctcatttcaagctcaaaaagcttcaagtcccgctagtctttagcgggcttttttgatataatgaaaggtatggaaattgagaaaaccaaccgaatgaatgcgctctttgagttttatgcagcgctcttgacggacaagcagatgaactacatcgagctctactacgcagatgactacagcttggctgagattgcggaagagtttggagtgagccgtcaggcggtctatgacaatattaaacgtacagaaaagattttggaggactacgaaatgaaactccatatgtattccgattacattgttcgtagtcagatttttgatcagattttagaacgctatccggaagatacttttctacaagagcaagttgaaattttatcaagcattgacaatcgggagtgattatgggcagtctcgtcatttatcaaggaataccttgcaaactattagtcgcagagggagtatttcctactcgactacaaattatctcgcccaatgatatctctaaagctatgcaaataggttttagctgttggggatatccaaatgaaatcatgaaagaagtcacacccgaagaactagaatgtttgcaacatttcggacgatttccactgaattgaaaaaataggagaaaataatggcatttgaaagtttaaccgaacgtttacagaacgtctttaaaaatcttcgtaagaaagggaaaatctctgaagcggatgtccaagaggcaaccaaagagattcgtctagccctcttagaggccgacgttgcccttcctgttgtaaaagactttatcaaacgcgtccgcgagcgggccgtagggcatgaggtcatcgaaaccctgaaccctgcccaacaaatcgtgaagattgtcgatgaagaattgacagccattttgggttctgagacagcagacattatcaaatctccaaagattccaaccattatcatgatggtcggtcttcaaggggctggtaaaacaacctttgcgggtaaattggccaacaaattggtcaaggaagaaaatgcacgtcctttgatgattgcggccgatatctatcgtccagcagccattgaccagttgaagactcttggtcagcagatcaatgtccctgtcttctcacttggtacagaagtccctgcagtagagatcgttcgtcaaggtttggagcaggcaagagccaaccacaatgactatgtcttgatcgatacggctggtcgtctgcaaatcgatgagaaactcatgggcgagttgcgggatgtcaaagcccttgctgagccaaatgaaatcctcttggttgtcgatgccatgatcggtcaagaagcagccaatgtggcgcgtgagttcaatgaacaactcgaagtaactggggtcatcttgaccaagatcgatggagatacccgtggtggtgcggctctttctgtccgtcagattactgggaagccaatcaagttcactggtactggtgaaaaaatcactgatatcgaaaccttccacccagaccgtatgtctggtcggatcctcggtatgggggatatgctgacgctgatcgagaaggcttctcaagaatacgatgagaaacgctctcttgaactcgctgaaaagatgcgggaaaacacctttgacttcaacgatttcatcgatcagttagaccaagttcaaaacatgggaccaatggaagacctgctcaagatgcttccaggtatggccaacaacccagctatgaagaaccttaaggttgatgaacgagaaattgctcgcaaacgtgcgatcgtatcatccatgactccagctgaacgcgaaaatccagatttgttgaaccctagccgtcgccgccggattgctgctgggtcaggaaacagctttgtcgaagtcaacaaattcatcaaggactttaaccaagccaaacagatgatgcaaggtgtcctctctggtgatatgaacaagatgatgaaacaaatggggcttaatccaaataatctgccgaagaatatgcctggtggcatgcctgatatgtctaccctcgaaggtatgatgggacaaggtgggatgcctgacttatcagctcttggcggaggcgctggaatgcctgatatgagccaaatgttcggtggtggtctcaaaggaaaagccggcgaattcatgatgaaacgggcgatgaacaagatggccaaacaaatgcgcaaaaataagaaaaaacggaaataattctttctagcaagggcctggaacacactgttctgggtcttttagaaactactactagaggaaacatgttaaaaaaactatttcaacaagtcattcgtttctttggaagactcttttcttcgcacagcaagccctttgaattcccaaaagggtcgaagaaaccaccgatcagaccgattatctttgtacctggtagttcagccagtattcagcgtttcaatggaaccatccgcatgctccatcgattttctagaaaaaaacagagtctcttaaaaataaaggtcaacaaagatgagtctatagagatggaaggaagactgaatacaaaagagccgaatccaatgattgtgattggctttgagaataatcgcgatggctacagcaatatcaagcagcaaatcgaatcccttaagatcgctcttacctaccttttggatcactatcattttacagagtttaaggcagtcgggcactccaatggtggtctagttttgactggtttattggaaagtggctttttagaaaagaaaaagctgaccgtaagcaagctggttattattggtagtccttaccaattcaaccaagagatgtatgatgattttcaaacatggaagcatcgcctaggaaaagaagtagaggtccttaactttgttggtagctttgctgggaaatcagacggcatcgtccctctttctagtgcacaagcagcacaatctatttttgagaaacaagcctatacagaagtcaatttaaaaggacgcaaggctcatcattccgctttacccactaatccagatctagtgaaacaattaagtctatttttgaatctataagtaaattacataatttcggttatgtaatttttatttgtctcttgcaatccttaagtaaatatggtacatttttggtagcgattacatatacctaaggagggttttatgaaagatcctaaattactagaattaatgaaagattacaggggacgggatgaagtgcccgcagactttgataccttttgggatcaagccctagcaaagattactgaactgcctaaatacaagcttgaagaacgagatttcagcattccaaatgttgtttgttatgaattaagctttaaagggacacgagatggtcttgtttatgcgcgagttgttttcccaaaaacagatcaaaagattcaagttattttccattttcatggttatatgggccgttgttgggattggacagacatgctggcttatacagtagctggctatggagttgtgtctatggacgtaagaggtcaatctggttattcaacagacggagatcgatcaccacttggaaatactgtaaaaggacagattatccgcggagctgtggaaggtccagatgagctattttataaggatatctacttagatctttaccagttaattgaaattgtagccagcctccctcaagtagacgacagcaaacttgccagctacggagcctctcaaggcggtgcccttgctctggttgctgctggattgaatccccgaatccaacgaacggtagccatttatccattcttatcggatttcagacgtgtattagagattgggaacaccagcgaagcctatgatgagcttttccgttatttcaagttccacgatccatttcatgaaacggaagatcgtttgatgcagacattggcctatattgatgtgaaaaattttgcccatcgcatcaaaggacaggttcacatgattacagggttggatgatgatgtctgttatcctgaaacgcagtttgccatttataatcgattagaatgtccaaaagagcatttattcatgccagaatatgcccacgaagctatgaatgttcaagtcaatgatcgagtctataattggctctgtggtagcaagattccatttcgatatgtagaaaaataagttacagaagaaaacaatcagtaaatccatgagatttgctgattttattgtgtttaaaagggatctaggatagaaagagatacaaaacaaacctataaaaactaaaagtttatgtacaattgacttaacatgagttaaaccattgatacaactgaattagaagcataaagtacattctttaaaaagtgtactttatttttgttttgtacattattctagagtggtattttgtatgttttatagtgcatcatataatcaaatctaagaaattgatttgtacattttttactcaagtaacagtagaaggagtgacggttcaattgtgcattttatttaaaatatttatggctataataatagtatttgaagcatagataaagtagatacagtggtataatagtgtcaaaagactttcaggagaaatgagatgagatcgcatacagttattctaggcgctggtgctactattgcagcaattccagatggtgataaaaatgggaaaagctcttcagttatgaatggattgctaaaaaaacttaatttagaagaaattcttgccggtgttgaattacagacaaagagcgaaaatttggaagatatctattcagaattatttgagagagaagagtgctctgaaatagttaggaagctagaagaaagactctatgattattttgcttcgttggagttacctgatgaaccaacaatttatgatcttttaatattaagtttaactaataaagattgcatagctacgtttaattgggaccctttacttatacaagcttatgttcgctgttcaaaaattactctgaacctgccacaaattctttgtttacatgggaatgtagctgtcggtttttgtgaagaacatactgagtatggaacagtagattactattgcccaacatgttataaaaatttaaatccaacaaaattattgtatcccgtaaaaaacaaagactattcttccgatggatacataaattggtgttggaaagcattagattactttgtcgatcattcatatatgttaactatttttggatacagtgctcctaagagcgatgtagatgctgttaatttaatgaaaaaagcatggggaaatattgaagaccgaccacttgaagaagtttccgtaatagatattatagacgaagagactatgctaaatacatggaaagactttattcatagccatcattataggtattcaaattcattttttgattcttacttagcaaaatttccaagaagaacttgtgaaaccgtatttgcaacattttcattaaatgttccttctgatggtagtataggatttaaagagaattttaattgggacatgataaaagagtttttatctgatatgttagttgaagaacaggaaaataaaggaaaatcaaatttaaaatcgaaatatttagtttggggtgaagatgttaacaaataatccaattaatcatagtgtacttaaattgtcaatggatttcgataatgcttttaaacataaaaatatagaggaaatctatagactaatagaatttggaaaaaatatggaaaacactattgatgatatttccaaaattcaattattttattctattgggacagcatacgctgatatatttgaactaagtgataacttagttttcaacatagataccgattttacagttcaacaaatttattacttaagaaaagctatagaaatttcaaataacgttgatataaattctgagaacagtaggtttgttttcccattattatgttcactttacactaattacgcaaatttattagatgcttgtggtagaaagcagttagctattaagatgtattgtaaatgtatacaaatcaatccaagattcacaatggctagtggtaacttggctatttgtctagatcattatcgtaattttttgaatgataacgaacacctccactttattaaaaaaattaaaaatttaatagaaacaagcataactgtttcagatccaaacagagttgattatgcagaaaagcgatttattgaactttacgaacaatatcttaattataaagacttagatgaatgctcttgtaaaaccatcgattataatcctaattcacaaaagtatcgcgaatggtgttggaataacgggctgtatcttaatccacttaatgacttacaagctgacgatataaatagatatgatgataatcttttactaccaagtttattatttcaatcggataaagatttaaacaaatatatttctatgtttaatcaaattaagcaagaatatgtttatgcgcgttatctctgttttaatagcattgaaattgattcggttcattatgctgatgagaatgttgatcttattgattgtctagaatacgtacaatattctatccgagtagaaggattaaaagcagcttttaaaacactatattcattattagataaagtaggaatgtttataaatgaatattattctttaaaaattaagactcgacaagtaaattttcattcaatttggagaacagatagcaatttaggtaagttgttggataagaatattggtctatcatctatattttggatatcgaaagattttgataatggtaataattctttgacagcaaatccacacgcaaagctattaaaaactattagaaattatttagagcataggtttactaatattacattgaattttattgatggaagtgaagaaaataatgaaactagactgtatctaactgaatttgaacttcaagagtgtacattagatttattaaatcttgtaagagaagttattttttcactcaaaaatgccattcaaataagtgaaaatgaaaaacaatctactctaagcagtgaagttgctttaattccgataaattatgaagaagtagattcggaagataaattataacattgagcatacaatttatagtcgttataaaaagcaatagtctaaattcatttaactaatcgacttaactagagctaaaccattgataaaactgaattagaaggataaagtacactcattaagcagtgtactttatttttgttttgtacataatttgttgattgcttaatcaatactacatctctatcaggcaattcagactccatttagtcctctaaaacccacgttgaggcggtatcactgcttgtaaaaaattagaaacctttaaacgaaagggagaatgaaaagcgtgaaggtagcttctctaatcgaatagagggtaagaatcagagtaatagttcaagtatggcttctggatactatagtctgacatgctatcaatctatttcagaagctggacaaattgtaataactttccttgaaggaattgaggtagatttataagagactgtgactgggaagttgcagtctttttaggggtttaatgatataatgaaattataaatgtggatattgtttaaattctctggaggacgcataatgttgaatttagtaaaaggacaccaagttagcttggtagaaaacctgtttgaatcatttacaaagttaactgaacatcatttgatggcgaatgtacacgcagaaaaaatattagaggtttttcaacattttattgcgattcatgacgagcccttgttttttattttggaattgcctgtcagtattgatagagaaaaagtgatagcaaagaatattatcaaggaatcccataaggatgtttattatattgatggttgttcaagagaggaatgcctagcactgttgattagatacggtgatttgcttattaatgatggacttagtcagtttggatttggtggtcataaaagtcatgatgagatcatgcttgatagctataatgttgtgacaatttatagtaaagaactatcgaaatttaatgacttttttgagcctcataatattcaatttgttgaagaactagtgacagcttggaaaactttttctaagacctccccaggaatctctgaaatctatgaaagtaatggaaaaactgtttatgatttgcctgaagaattagctgaatggggaatatatttagctgaaactcgaacagaataggtataactatagattagaaagagaatatttcaattccttaaaattttatttagagcaaaggtggatattgaagttgtaagataaataatgattatttatggcagaactctggttctgccttttttatttatgaagtatatgaaaatatggcataaaagactaaagaaaaaatgcaaaacgtttaataaattagaattttcttgctactttttgaaaaatattttttccttacagaatccttaaaaatattttttatactatttacaagattaaaggaggaacaaaatatgagcaaatatattttggaaacaaatgagctaacaaaagtttttggaaaacaaaaagctgtaaataatgtgtcattaaaaattgaggaaaattcagtatatggattactaggacctaatggtgcaggtaaatctacgacattaaagatgattacaggtatgttacacaagacgtcaggtgaaattatgtttgaaggacatgaatggaggagaaatgatttatcagatattggtgctttaatcgagatgccacccttatacgaaaatttaagtgcaagagaaaatctaaaagttagaacattattacttggattacctgatgcaagaattgatgaagttttagaaattgtagatttaaaaaataccggaaaaaagaaaagcggtcaattttctttggggatgaaacaaagattaggtattgcaattgctttattaaataatcctaaactattgatactagatgaaccgacaaacggattagatccattaggaattcaagaattacgagatttaatacgaaactttccaaaaaaaggaataacagtaattctgtctagtcatattttagcagaagtggaacaaactgctgatcatataggaattatacatgatggagaattaaaatatcaaaacacaattaatcataatgaaaatttagaagaactttttatggatgttgtaaagaatggaaagagggtgtagcttaatgaaaaattatatttttgcagaaaatttgaaacataaacatagctttttgttgaagatattactcattgccccgattatagctttactaaatgcatttgtattgatgccatcatattttagcataaacgcatacaattggtggtatgtgattttaatgccggcaactttcgctttaatacctgcaatgatgcatagaaaagaagagagaaaattaaactaccgagcaatttttccactcaatattgatttaaaaaagatatggatttcaaaaatattaacagcttcaatttatctaagtataactgctattttgcatatgctaggagtatttgtttttcaatttttcattggagaacaattaacaggaaactatgcattcacgacattattattcgcaagtgtattattggttataactaacatatggcaagttccattttgttttttcctggctaaaaagtttgggtttatagcaagcattgtagtaaatgctgtattaggtcttgtgttaggaattttgttagctgacggttctatgtggatttattgcccttattcttgggggattagattgatggtacccgttatgcgtattttaccgaacggtatcccaacagaagtatcaaatccaatgattttaaacacatccttacttgttccttgtattttatcaatatgtttgtttacattattgactttcattactgcaaaatggttttctaagcaagaggtgaagtaatgatgaatatattaaaatcagagttttataaattgaagcatacttggattccatgggctcactttatcttacctgttttatatgctctaatattttattgggcagcaacatttacaagtctaaaaaatttttctgatatggatatcatactgaattattttgtgcttttaggtgctatcttaccaataatatttggtgttatcacatctaaggttgttgacatggaagcaagtgctggacgatttcaagtgattctatcaactacaaaatccagaagtaaagcttatagtggaaaacttataatgctcttattgagtttcctattttctataagtttagcagtttttatatttgcaatgctatttggtaatcaagggactatggcttggttaattgaattattattagtttttataggatgtttatctacatatatgattcatttgtgggtatcaattatgttaggtggtggtgcatctattggattgggatttgtagaaacattgattgctttactttcaataaccaatttaggtgaaaacatctggtattttttaccttgtacttgggcatcgagattatctgcaacatatattgttggaagtgaattggctgatagctcatatttaattaaagagtttaccatgtggggatatgtagcaatacctattacagtagtcatttttactggctctttattatggttcaataggtggggtggaaagtcaatcagtgaataatagctctaaatgtatttgtaaatggaatatggtataataataaaatatttataaatatggaggtggtttggtatggcaagaattcttgctatagatgatgaattagatatgctgactctaatcaagaatattttaataaaaggagatcatattgttgatatttaccaaaccacggtagatattgatgaaaatagtttggggaaatatgacttaatattacttgatgtaatgatgccagaggttgatggaatcagctattgtaaaaatatacgtagcaaagtggattgtccgattatctttttaactgcaaaagcaatggaaacggatatagtagatggcttattaagtggaggagatgactatattaccaaaccatttggtgttggtgaattgttagcaagggtagaagctcatctgagaagagaacaaagagaaaaacattcgagtttaaacctagggaatataagatttgatttatcctccaatcaagtatttgtgaaggaggaagaaattcatctgacaaagtctgaatatcaaatttcgaagcttttagcaaagagaaagggacaagttttttcaagagaacaaatatatgaaatgatttttggatttgatgggattggtgattcttctgccatatcagaacatgtaaaaaatattagagcaaagttcttaaaatttggtgaaaatccaatttctacagtttgggggattggttataaatggaattaattagaaaaggacagtcactcaaaatagtatttcttaaatacttaatgactgttggagttggtttaggatgtgccatcgtactagctttattaacttttacagcgttttatagtgttggtttgattattccggctaaccatacagaaaatttattacaagaaaataaatataaaattttaaataaaatagactttgatgaagcattgatacctaaaggagctagctatatgtttttatcgccagatggtgaagtgataaaaactaatatggatgaagctattcaactgaaagctaagaattttcacaatcatgagggattttcaactccatcttcttcatttatagaatttaaaaggaatgatggatatgtattaatccattattcactagagccacactacaataatgattggatggaaaaatatttccctagtgtagatttactattaatatttttattaatcattttctttttaatgagtgcatttgtggctactctaatctgggcaaaacgaataacaaggcaattatcgccaatgctagaggcatcagataaaatcgccaaccaagaattagactttgaaataggaagttcaaatatcaaagaatttaatgatgtcttaaatagccttgatataatgaaaaaagccttaagtgattcattaagagaaaattggattaaagaagagaataagagaagtcagatatcggcattaatgcatgacttaaaaactccggtttctattgtccaaggtaatgctgaattgttaaaggtaactgatctaactgatgaacaaaaagattatgtagagtacattataaaaaattcaacacgtatatcagattatacaaaagctctgatggagatgaatcagtcaattaaattaaactcgttgaatttaaaaaaagtaaaggtgtcagaaataatcgaaagagttagtgaaatagcgagagagattacactaatacatgaccgtactatatctaaatctattaattgtgaagattcagatgtaatgatagatgtacaattatttgaaagagtcattcaaaatatatttagtaatgctattcaatattcaccagacaaatccaacattgaattactaataatgactacagataagatactttcaatatctgtgatagacgaaggcccaggattttctaatgaggatttaaaacgaggaacggagcaattttaccgtggagataagagtagacattcagctacaaactatggtttaggtttatataattcttggaaaataatgatattacataatggacgcatcatattagaaaacaacacggataaacatggtgcaagtgtaaagttagaattaccattactataatagaacaggaattgttttcaaatggaatttattaaaaatatatcctttttgcttttggtgtagaatagaaaatttactccgctatcaagcaagaatcgtacatagtagaaagctaaatgaactttgataactgaacaaattctaaaagttaacttataaatttctagaaggaacggaagaaaatctgtgtttaactgcaactagtaagttgcagttttttattttgaataatgatataataggataagaaaaaaatgaaaacgctatatatttgaaagttgattaggaaaccaggaagtatggaaacaatcgatatgattattaaatcatcaactgaattttataacgatttagtttatcagctttcagatacggtgagacacattttaattttattattagggaaagcaactagatagcgcattattaagatatttttacatataggaaactaaagtgtagacgaactggatgggttactagtgaaaactgcaagaagtgttggaaggtgaatcggagagtgcttgatgaattttattagtaagatagccataaataaaggctggtcagatgataaaaaatattgtgtgacagatcaaaatcagcaaaaatatttcttgcgtgtttctgataaggataagttagattctaaaaaatttgaatttgatatgatggataaggtggcttctcttggagttccgatgtgtaaaccaattagcatagaactctgtgatgacgaagtgcattctttacacgaatggatagacgggaaagatgcaagagaaaccattttaactgtttcaaaagaacaacaatacttttacggagtagaagcaggaagaatccttcaaaaaattcattcactccctattacagaagttcgtgaagattgggaggtcttttataatcgaaaaattgatgacaaaatctccaaatacaaagaatgtcccgttcaatatgaaaatggtcagacctttattgagtttttaaatgcaaatcgagaattgttaaaagatagacctcaggttttccaacatggagattatcatatcgggaatttcatgattggtgaagatcgtaatatttatgtcattgactttgatcgatttgaccttggagatccttgggaggaattcaatcgtattgtatggtctgctcaagtttcaccttcttttgcctctggtatgatagatggatattttgatcataaggttccagatttattttggaaacttcttgctatctatattctaaataacatagttggtgctcttccatggtctgttccttacggagttgaagaaatatcagtaatgcaaaatcaagctaaggaaattttagaatggtatgatgatatgaagcaaatcattcctagttggtatttgattgagaaaaaagctgaataataaaagagttgattaaagaagaatttggtagttgggacgttaaaagtaaagagactcaacaagtttacaagttagcaagtaaattttttaagtgacaattatcagctataaagttgaaaaatggtaactataaaatagtttcattctacattttaattttaaacaacaactcagttactttcgttctttaatataggagtatactagcaccacatgttgaggcggtaagtttgctagtcaaggagtaaaacgacgaagattagcatttacttccgcccatgcgatagctgtccgtgattgacaagtgctagcacgcagacagaacggagatagcgaaccgctgagtgtgtcgctctgctcgtaaaagcttagaaacctttgaacgaaagggataatgaaagccttgattgcaaggctttttgctttatggtgggtaagtatcagagtgagaaaatttttggaatgagtagaagtgatagctagaaattatcagtttctatttccatttaccctgtgggtacgtgtttgtttccattgacaaggagtttgtgggaatagaaatgtacccaccttgtttgaatcaagtgaagtgtagttgaaggaaatctgttgaaagcaatacttcattttaccgaataagtaataatttaggcaacttcaaatcgattaaaaaaaactattttaaaggttaagagtagacaaaaattgtccactcttttttgcaaactcaatttatcaataaatgaaatgagggaatgtaaaatgaaatattttgaggttgagttagaaaatcctgatgaatttttaaaactacaaacagaagattttgtgaaagctaatcgcttgctactaaggaagataatccagagcgttacagtctatgaagaaaacttcgtcatatcctttaaatctggcatcgaattggaagtatgagtctcattccataacttttatattgaacatatcatcttgttgtgttatactataaattgatataaacaaagatgtaggaggaaccgaaactatgacagcctcaatgcgtttaagataagctggcaataaaaaaagcagaatctatacccgatgataggcttttttgttgtgcttatttatacgatattgagcattcattagttacggtgaggatattggttatttaactatacctttatttaactatgtctttaatatgaatgtttccaaattgtatgtatgcagaccaaaagccacattgtggggtttggcctgcattttttattgcctagaatgctattaaaaatagaaattcaagcaaaataatatgcaggagataatataaatggaaaaatacaacaattggaaacgaaaattttatgcaatatgggcagggcaagcagtatcattaatcactagtgccatcctgcaaatggcgattattttttaccttacagaaaaaacaggatctgcgatggtcttgtctatggcttcattagtaggttttttaccctatgcgattttgggacctgccattggtgtgctagtggatcgtcatgataggaagaagataatgattggtgccgatttaattatcgcagcagctggtgcagtgcttgctattgttgcattctgtatggagctacctgtctggatgattatgatagtattgtttatccgtagcattggaacagcttttcataccccagcactcaatgcggttacaccacttttagtaccagaagaacagctaacgaaatgcgcaggctatagtcagtctttgcagtctataagctatattgttagtccggcagttgcagcactcttatactccgtttgggatttaaatgctattattgccatcgacgtattgggtgctgtgattgcatctattacggtagcaattgtacgtatacctaagctgggtaatcaagtgcaaagtttagaaccaaatttcataagggagatgaaagaaggagttgtggttctgagacaaaacaaaggattgtttgccttattactcttaggaacactatatacttttgtttatatgccaatcaatgcactatttcctttaataagcatggaacactttaatggaacgcctgtgcatatttctattacggaaatttcctttgcatttgggatgctagcaggaggcttattattaggaagattagggggcttcgaaaagcatgtattactaataacaagttcattttttataatggggaccagtttagccgtttcgggaatacttcctccaaatggatttgtaatattcgtagtttgctgtgcaataatggggctttcggtgccattttatagcggtgtgcaaacagctctttttcaggagaaaattaagcctgaatatttaggacgtgtattttctttgatcggaagtatcatgtcacttgctatgccaattgggttaattctttctggattctttgctgataaaatcggtgtaaatcattggtttttactatcaggtattttaattattggcattgctatagtttgccaaatgataactgaggttagaaaattagatttaaaataaacaatattggaggaatatttatgtatcttattttcatgtaactcttcctgctaaaatcgcagggttttccctgcatacaagcaaatgaaagcatgcgattatagacaggaggaaatgttatggaattaatattaaaagcaaaagacattcgtgtggaattcaaaggacgcgatgttttagatataaatgaattagaagtatatgattatgaccgtattggtttagtaggagcaaatggtgctggaaaaagcactttactcagggtacttttaggagaattaactcccccaggatgtaaaatgaatcgtctgggtgaacttgcctatattccccagttggacgaagtaactctgcaggaggaaaaagattttgcacttgtaggcaagctaggtgttgagcaattaaatatacagactatgagcggtggtgaagaaacaaggcttaaaatagcacaggccttatcggcacaggttcatggtattttagcggatgaacctacgagccatttagaccgtgaaggaattgattttctaataggacagctaaaatattttacaggtgcactgttagttattagccatgaccgctattttcttgatgaaatagtagataaaatatgggaactgaaagatggcaaaatcactgagtattggggaaactattctgattatcttcgtcagaaagaggaagaacgtaagagccaagctgcagaatacgaacaatttattgcggaacgtgcccgattggaaagggctgcggaggaaaagcgaaaacaggctcgtaaaatagaacagaaggcaaaaggttcttcaaagaaaaaaagtactgaagacggagggcgtttagctcatcaaaaatcaataggaagtaaggaaaaaaagatgtataatgctgctaaaaccctagagcacaggattgcggccttaggaaaagtagaagctccggaaggcattcgcagaattcgtttcaggcaaagtaaagcattggagctccataatccataccctatagtcggtgcagaaattaataaagtatttggggataaggctctgtttgaaaatgcatcttttcaaattccgttaggagcaaaagtggcgttaactggtggtaatggaatcggaaaaacaactttaatccaaatgatcttaaaccatgaagaaggaatttctatttcgcctaaggcaaaaataggttactttgcacagaatggttacaagtacaacagtaatcagaatgttatggagtttatgcagaaggattgtgactacaatatatcagaaattcgttcagtgctagcatctatggggttcaaacagaacgatattggaaaaagtttatctgttttaagcggtggagaaattataaaattgttgcttgctaaaatgctcatgggtagatataacatcctaataatggatgaacccagtaacttccttgacataccaagtttagaggctttggaaatactaatgaaggagtacaccggaactatcgtgtttatcacccacgataaacgattactcgaaaatgtagcagatgtagtttatgaaattagagataagaaaataaatctgaaacattaaatttaaggtagtcgctggtcagtatagtctgttctggttggcgactccattgttaaagagtataaagactttagattttatgaatattaaaaataggaacagtcaattgaactgctcctatttttctgctaaatatattgtagttttcttatatgtataatgatagattagcggattctcatctacggtacttacttcaaatatgaagaagtgatcgcggttatctctggacttttccttattgaggacaaagtaattcttacgtgaagtcgccattgtttttaggatatcatcagttaggaaggtcaatggaatattcatgttagagtagcggtagaagtcacgttcaaaatcttggtagctctcgctataatagtccatttgtaggtgattacgctgaaactcaagctgattcatagagcacctcctcgacaagttcaatactaataatgtcttttaatttcaaattgatgtgacctgttgtagtttttatcaaaatgaaatctttggtcagacttggtattgttccagtgtaggaaacacgcttgtttttttcaatcacttgaatgcgtgtgcgtagctgcccggcgtatacttgactgaggagtaataatttcttctctagtgataagtcagacatgtacgttactttgtttgtatcatcagagagtgctgatgcatgttcagataggaaaaagcccatccatttttgcatctttgtatcctggtactctcttgctgattgaaatggtaaatatgaacggtcaatcatatcaaatcctttctatgcagaggcaagggtatttttatcaaattgaatcgtaaaaccttgaattcccccacctgtgtaacattctttaaagcgattgattacctcagtatagattatcacagatgagcttgttggcttaatgctaaatgtaaattccaatggtaatcggttttcagatttagcatgtactagtcgtatcgatatttcagttgttttgagttttctctgacgaagttttgaagttgctgtttcaacgattccatgtaaaaatctttcaagcatttcaatatcattacatcctttgctacggatttctgaaaattgtactgtatttttttcttgtttcattttaatccctccaatccacccgcggaatgaccaccgataagtttactgcgttcaatatttctggaaccttcagttaggacggttcctttttgtatggctaaaaaaccaaactgttctctgacaacatcaatagctgtctgaagtctattatctttttcaatttgttctacatcatcaaagagtgatagtagagtatagctttcatctacgaagccactataagatacaccaatttgtctcactgcaccagaggtgtattttttcggaataatacaagtacatgactcaccattgttttggggagatttgcgggttcaattttattctgagcatttatagattttttcatctcagtcctagaatagccaatatgaatagaaacgacagtagtcaatactagggctactgttccgttccacagtatcatttaaaaatcattttcacaccctttcgtctattagtatagaagaaagctctcagcacatgttgagtgtgtaagtttgttagtgaaacgtagctaaatctctcgcttttttatttcaaagctccagtggagctttgaactcccaaaccttttgagtcccacagatgcattataacggggctgtagcattgatgtcaaaactttcacctcctatataaacaaattctatccaacgtttaaaaaggatcagtagctgataatatatagcggtttgcatcgtgacgacaagtaggtggattacgattatttgtaatttataaaatctatgatgagaggtacgtgattagaggtatcaagtaatttttattttgctagagcaagcaacaaatcttcttcataaggactatgctaagcagatgtatcagatactagatttagataaatttgaatgagttatgatgaatcaacttctagaccacatcagcatttaagaggataggaaaattagagtacccttcacagagggaactgaggtacagttatagaaaaagaaaggctgtaataacagctggaaaacattttcgttacagcctaatttgcgtttttgtggtatactgaaattgttgaatgactttgaaagtaaacaagaaaaataactattaaggcttttatatttgatagttatattttcgaaaatataatataatcaaagatattgcagatggataataaaatatgactagagaaaaagcgtttaaaactattgaagagcagattttgattcaacggggcaggaatttgaagattaccgatgagccagggatggtaagttttattcagcagaaaaattattttaattctataaatggttttgaaactatttttttggagacctctaaccctaaaaaatatatgaaaagagtctcttttaaagattttgagagaatatacacattagatagaaatatagctaagtacctatttcaagaaatcgaaaagattgaggttgaactgaagtcgagaattgcatacgaattttcaaaagttcattgcaataatggtattgcttctaacttaaagtatttagatatcaattgttatgtgctaccgatagcacacaatcgaaattcttttacagagtatttttatactcatggagataataaaaaaacgcattctttttttagagtgcatactatttctgccaagattaaagatgtaatgtttacaggtaaaattagtacctctcatactcgtaacggagatgtatattacaacctagaaggtgattttgatggaatagttgatgaccttaaaataaatcaatatcgagggagattttcaataaaagcttctaatactcctagtaatatttcttcattaaacggttctatgaatgtgacgattcaaattaataacatagagggaagattttttgaattatcttattcagacttctgtaaaattaaatatccatatatttctagctataaaaatcctccgctttgggttattattgatacactaatgttgaatgacttgctggttttattccaaggattagacattgctatacaaaataaaattatgagtgagatgggatttgattcctctattagtgggagtcgagaaaaattcattaacgcttgtgaaatactgcgtgagttgagaaaccaattggcacactttggtctcataaccagatataggacgggaaatagtattctaatcaatagactttttatctctgatttgttacttactcctaaaaggaataatagagttttaaagttttatcaaggtttaaaaattttaaattcttttaatagattctctcttaaaaggattgatcgagctattcaatcatattatttaaaaaatatgttactattgaagtttgatattaataaaaatttttttaatagaattggcaagtaagtgttgcaaaaagttgctggttatgatagaataatatagttatattttagtgccacgacggcgtgaaatccttgaaagaggttttcaaaaagtcataagggggaaggttaataaactttcctccttattttatttatttagataagttgaaaatagtgttgaagatgtttgatttctgaagtaccttgaattgtatagagtttacatgcagtttagaatttctgatttattatccagaggatagaaccgcttattgaagatattttagaaagttagtcattaccaaagttaatatttatttctacagtataattctaaaatcactttttttctctttcgtctattagtatagaaaaaagctaacactacatgtggagtgtgtgagtttgttagtgaaacgaaattaatcctcaaaaggtttcccaaaacttttgagtcccacagacgcatcatgaggagaaatcatgagggatattatcagttgaataagtaagagtataatctacatctccaaagtaggagtggctagttccagcagaaagaccttcataggttttataactgaatagatcgacttactttgttgtcgaatttttcctgttcttcaagtaattctgaggaatagacgacaactttaaaatcaaataagctaaaaacgctctaaaatcattaaattgatattaaagtgttttttattgtcaaaatatacaattgaaaaaatttccagcttttttaaaatcactatctcagatgacaatttaatcaaaatatgatataatacagaaaaagtaaaaataacaaaagtaacttaccaaagtaaaagaaaaaaagtatatagatagccacggcggatattcctttcatcgtttagaaggagttgctgtggttatcgttgttgctgagctagttaattgctcttattacttagatgaagttacttttgttattgaattaatttaaataataataacgatcaatgaaagtactcatcgatatttcctttttgcagtttagagcgcaaaggagaacagtactgatttggtcgtttttttgcgtattgacatcctaaaacccagtcagaaccttcagtcataataaacaaggagaattaatgaaatttgtagtttataaacattcgctggttttaggtgataacaacattgtgacaaagcaatttatcgttttaaagcacgatgatggcaatctacaatttactgattttcatcgttatgttaaatctacttcaagaatcaagtcgatctcagatgatgggaataaacgcttttcttacgttgttaagtttcttaatttcatatttggtactcttggacttaaaagtgtagatcaacttacacttgagatggtcagagagttttttacgctttatggattatctcagttacctgaagatagcgggaaaagaaagaaaagcactgttgaaaaatgcgtaaatgcaattctcgacttcttaactctttatttaagtgagcgagagggaaaggataagttaaaagcagaagaattgtatactacgacaacttttacgaatagtagaggacgggttataaagcgtaaagaaccaaattttgaaatctacgtggatgatagcaacactgagaaagctatttttcgcgatatgccaaatagtgcttttgagatgttgttttctcacattgcacactatcataaggatttactcatggttgtggccttgggggcctttgttggcttaagaccatcagaagcatgtaacgtaagacgtgaagatagtcctctaggaccaggtattttatttcaccaaagtgatggtcaagtatttaagattgagatcgatctacgaaaagaaatacctcttagaagcgatttaaagccgactggacggattaaaaaggaaagacttcaagcagtaccttatatcttcttggaggtctttttagacacttataacgactatatgagttatctggaaggtaagaagtatgagaaggactatgggccattaaatcttaacagacgaggaaaagcattatcatacgatgtatactatcaacgttttcgtaagattattcgtgaagagatgatcccaatcttcttaaagtccgatgatgcagaggttgttttcttcggtcaacttttacaggaacataatatttccccacatattttcagacactggtacacgacacagttagtcttatctggggtttctgagattagtgtactcatgtctgcaagaggtgataaatctcctgagagtgcttgggtttacctgcaaaataaaggtgaaatcgcaaaacaatatggtcaagttaacaatggcgtttttgactatatgaattggcaagcaaatgaactttttggtgataagttagaaaggtaatgtatgacttattcaattaaatctttgattgaaaatctgttaagtgaactcggaaaaaacgatatacagtataaaggcaaaattagtaagtttttagttgataacaattggtttaacatagaaattgatttggataactattctatctcagataaagaggctcaattattaatagaaaaaataaccaattatcttcttggaccaactggtttagcaggaattcagcctatatttaaacaaaaattcccattaacttacaaatattttcagcaatactcagaagatagcaacttatctaaagaaaacatcttttatgttcaagattttcttgcttattatctaaaaagagatttattcctctgtaatgataatgaaattgaattgttggttgaagaagcagtatatgcacttgaaaagcaaaaaggcgaagtttttattgattttttaaagtggttaatgaataaaacgagatgtaactatcacaaaagatatgaatttacacctcgatacacattagaacaggagactaacgcttatgagttagacgaatatttagaattactgtattttctttttaatgacgattacattagaaaagaagatatgctttataaagcagcaatctcaaaagactacgcagatacatggctatttctagcacttcattttatatgtgcgctacgtggaacagatttagaacaacttgggcatccacaacttcctagaacaccaaaagaagttctaaaatcagttagaagtggggattggagtagcagtgaggcaagaagaactcttttaagtattacaactcgtttaacttatttaaatattactccaaacaaaacaaagggaactaaaaatattagtcagattaaatttcaggtccctgagagctgtcaggtattgattggaacgttgttggctatctgtgaagctcattatcagttgaataaagataataataatgaacctttaattcgacaaataaaagaatataaacgaattagccgatatatggggaaagaaattggagacttatttcttgaaaggaattttagttctagatctgcaaataaatcctatcttcaaactgttgccatgttagcagatgatgttttgcaagaaaaatctgagttaaatattaaaggctattttttagctgcattagcccgtagccataaaggttcattcgatgaatttgctcaaaccacaacaacgtacctaaaagatgcccaactaagtcagcttaaaccagaaatggttgcgagagaactatttgaacgaggtgttttatctatgattccatcaatgctcctgacgattgttaccagaggaaagtataaagaattaagtcctagtcaacaaactcagatgattaaacagttagatttgacaccaaatgagatcgaaaaaacattggctttaagtattcaggcagaagtgaaatcgcaaaaggcattaaagattttggtagaagaagaagcagagcctaatcaacttcttactatttgtcatcgtataggaaacggtgaagccttctcaaaacaaggtgaaagcatgtgtcttttgtctgcacttggaaagatttgtccatatgacgatagacaacattgcatcggttgtcattatgaactacaaactaaatctactttattgttattagtaggagaattcaatcgtttgaacaaacaatactctagagttcgaactgatttagaaaaaggtaaaattcggagtattttagaagaacaaataaaaccttgtttaactgaaatgttgcaagctttatgcgagcaatatggggatgacgtgttgcatgattacgaagaaataataaaggagttaataaattgaacaatcaagctaaactttttaaaactgaaaattattttgaaccatttaactgtgattgtgttctgcgagcaaaagaagttttcgatgattattttgaaaaaggaattattctaagttacgattttgatcataagaaatgggaaactacaaatgaatatgccaatattagcctgttttttaacattcctgagtttcaatataggagattttatcaatcaatttttcagttgccttataaggaatttatcgattacttaaaaagttttattgttttctcaatgaaacaacatgttttagaaactttgcagctatttctaagagatattaaacgtattatcaaaaatacaaccaaagatacgtttttagatttagaaaatatctctgtaatatttcctggtttatgtattgactttttctcaaatcttccctgttcagatgatattcaactaagtcaactattggagcaattggataataaattaactctcaaccttcaaaaaaggcagaagtcaaaacagcaaagacaattagcgcaatttcaatcctattttacttttaatgacattttaaatgattattggtctcaaacattatctaagaaagaacgtctattttattatccattgtatctctggtggcagattacagcgattttacccttaaggccaagagaatttcttttaattcaaagaaactgtttgaccgagaaagatggaaaatattttcttacattaaggagaaatataatcaaaggaagggatcgacttgttgaacataaaatttctgaagattatattttgaatacttatgaaattactaattcattagcttctgaaataaagacttatctcaaacttacggaaaatgatcgttctactaaattagatacattatttgtgaccgatccccattataatcgttggggtcgtcgaacaggtgttaataaccgatttttaacttacactaatctcaatactattttgaggtatttttttaatgagataatttctcaaaaatacggttatcaagttaattattttagttttccagttagattagatgaaaacgagattaatttgattcatattggtgatacgagacatattgcaatgatcaatttaattgcagaaggggctagtcctgttacagctatgcttttagctggtcatgaaagtgtgacaacttcatctcactatttttcaaatttaagccaatttattgaatgtcgtagttatcaaatgtatcgtaaactaacgagtaaaaacacgaattacgccataagtaagaggcagccattttatacagcacaaggacaatacatcactttagaaaataaaggacggtgttactcaccccgctttgcgaaaggtgattattcagattgtctgaaagttattagtgagcatgcagaactaggtgcttgtacgagctgtcctttttaccgtaaagcaggtaaagattatttttcaatggataaatcatttaaaaagtcagttgatgaaaaagctatggttgtaaatgaagcgattagaaaagttagacaagggaagggtcatattgaagatattggagaagctttgttgaaattaaaaacagttagcaatacctatcaagattacttaaatgctaaacaactatctttagaggagaataagtctaatggctagaaagaaatcaatttctgatgatgaattgattcatttgtttgaacagtatttaatttcccagtgttcctgtgatttaagcttggtaaaaattcctcggttcggtgactatgtgaggaatcatggctatcaaaatgttgcggatacaaccattagacgtaataaaagattcagggattttttaaaagaaagtgaaattaaatatcaagatgaaaattatgagactgtgattacttacaagaccatagatcctgacaattttatagcaaaaaatcgtactccaggttctatgaaaagagcattggtggaaattagccaatactataagaaaatagcaaatattgcggctagctataaacaagaagcagataaattacgtgctttaaattctgaactacagtcaactaatgaagatttaaaacagaagctacaaagagaaaatgagttaagtgatgagaatcaaaaactattacaaataatcaaaacaagtgtctatccagaaattgcgaatgagcttttaaaagaagagggattgctaaaatattctcaaaaggttatcagtgaggatttcctagtagacaatatcattactgctgaatcagaaatagattttcattctggtggttttattgaacaagaaaatcctcaaaaatcaactaaagtggtttctattaaaaacttactggacagcaaaactaattataaatgaggaaagaaatgaacaagaaagttaaagataatccagctatttacatgtactgggatcaaaaacgaaatgttcttgaccccaaaaaattgtcgtcaaatagtttaaaatatgcctattggtcttgcccttattgtcaacaccattgggaagcgaaaatcattgatgtgcagcttgacagttatgaatatcttaggtgttgcccccattgtggattaggtgaacgttccattgatgaaaatgagagtgttcttcaggtttatcccgatttcagaaattatataaactacagcattgagcaagatgaagaattagatgagaaacttcttactttgccgttcaatagtaaaagaaagttcaattttaaatgtccgacttgtcaattaagttggaaagattctgcgacaaataaaaggttattccaactaacaagtggggatttatttcattttggttgcaatgaaactacctatcattgcgattacaaatctgtctatccaaatttagctaaaatctatagtgatcatttaaacaaatttaaatttaacgaactgaagctgagttacaatataacagtacctattcattgggaatgtgataagtgtcattgcaaatttgaattatctattgatagattattgaaccgaattaaaagaagcggtcattactgttcggagtgtcattcttcatttgaagagttattggataaagattttgatgtttctcctctatcttttttaaattcttccatgctcaaggagtggtctaaaaggaacaatattacacctaatcaagttgatgtattatctaatgttcatgtgttatgggaatgtacgaattgtcacggagagtattcatgttctctatttgaaaaaacagataggtcttgtccattttgttcaaatagagaaaaacttcaggattttaatacactaaacgaaacacatccctatttgagggaattttgggacctcagtaatgaaagggatttttccgaatattggtttaagtcaaataatgtagttagttgggtttgtccttgttgtaaaatcaactttcaatgtagcccagccgaaatgatcagtcgaactgatttagaaaatcaaaactttcaaacatgtcctaatcaatgtgactggaggactgaggtatttaaaaataatattttccttaaagagccaaagctgattaaagaatggagtgataaaaataatattcctattcatttagctcagacaacaattgagaccaaaaaatattggtgggattgttcaaagtgtcatgggacatatttatgttctatcccaattcgaagagaagtttctcagtgttgtccttactgcaacaatgataagcccctgaaggggtttaatacatttgattacttataccctgaactagcaaaattgtgggcaccaaataataaagtccctatagatagttttgttccattattaactgaaaaaaggttctatttatggcgctgcaaagaatgtaactttgaatttcatgagcgcttcagcattatattaaataagtatttaagttccgagacaaaagatcttaaagaaatgtgtccgttttgtgcagaattaaaagaaagacaagataatatctcttttgaagatttaatgaatgagtgggactaccttaataatcttattctaggagatccagaaagaatcacaaatagtacgaaattaagattttggtggatttgtaagaacaatccagagcatcgttatagaatggctatcgtagataagattgcaaatataaaacgatctatcgagccatgcatgttttgtaaagggcgtagacgaaaaagagaacattttgtcccttataggaaaatttaaaaacaagttcaaatttgaacttgtttttttatcatagatttttataaagtacattattttaaaagattgtatttttagttttcaagtagataatgtacagaatttaagtatgcgaaagatttagttttcgcgggaataaagtacattttttgctcaaaaaaaaatttttgttaattcaattaacccctataacatctttccgaaaaactataattttcttgaaaaatatatctggctatgctatactactagtatagaaagatttggagaaaaacatgaaacgcgagatcttattagaacggattgataaactcaaacaagtcatgccttggtacgtcttagaatattaccaatcaaaactggccgttccatatagttttacgaccttatacgaatacttaaaggaatacgatcgatttttcacctgggtcttggaatctggtatatcagatgctgacaccatggctaatatccctttagaggttctggagcacatgaccaagaaagacatggaatcctttattctttacttacgtgaacgtcctctgctcaatgccaatacaacgaaaaacggggtttcccaaacaacgattaaccgtaccctttctgcactgtccagtctctataagtatttgactgaggaagttgaaaatgagcaaggggaaccgtatttctaccgcaacgtcatgaagaaggttgctaccaagaaaaagaaagaaaccctggcggcccgggctgaaaatatcaaacaaaagctctttttaggggatgaaacagaaggtttccttaactatatcgaccaggagtatccacaaacactctcaaatcgcgctttatcttcctttaataagaataaagagcgagatttagccattatcgcactccttcttgcctctggtgtccgtctctctgaagccgttaacctagaccttcgtgacctcaatcttaagatgatggtcattgacgtcactcgaaaaggtggaaaacgagactcagtcaatgttgctgcctttgctaagccttatctagaacaatatctcgctattcgagacaaacgttacaagacagaaaaaactgatactgccctctttctgaccttgtatcgaggtgttccaaaccggattgatgcttctagtgttgaaaagatggtcgccaagtattcagaagacttcaaagtccgcgtgacaccccataagcttcgccatacattagcaactcgtctctatgatgctaccaaatcacaggttttggtcagccaccagctaggacatgctagcacccaagttacagacttatatacgcatatcgttaatgatgagcagaaaaatgccttggatagtttataaaattacataacgtaaattatgtaatatattagttttaaaaagagcgatagattttttgaatgtctaccgctcttttatactttctataaaaattcgatccaataattacggtgtggctcaataatgactggttttccccagaatgattttagataggccaagtttgcaggggtgacaggtcttttttcaccattgaacttctctgcactctctttcgttagaaagcatttaacagcttcatatggtgtaccatcgctcgctattcgatcaattcctaaataagcaatttcatcaccggcttttggaaaatctgtaaatagtttaccaataaaataaaccgtcttatctttcattaattcataagccttactattttccagtctgttattcgctgcagcgtacataatacaaaaactatccacaatatctttcaaaggcattaattcttctttgctgactataatttcgtcgggagcaagtccaccaatgattaagttttcataatgaggttgctggatgatattatctaaagccattcctaatggtagtttgacagtttgatagcctaatggttcgagctcttgctttttctggtcaaggtgtccttgcgtaatactgacattcaaatcataaggactggaaggttgttgcttgctaaaaaaagccactactatacgatctaactgttcaaatagaccaagattttcaactggaattttcatcattgaatatgatccccttttgtgttcagatttcctctatattctactctcattatttttgaatatcaagaaaagaggccgtgtcatgaactaactttcgttttacaactatattttctcaccaggcataatttttctcaccgcatgtaaccatggctgctaataactcctctggtgtcagtttcttcaagcctccataggttggatcctgtacatgtgtatcggggtctagataatagattgctgagatgtccttgccatctgctgtcaattcatagcctactccaatcacattatgttccccactttttccaggatagatttgtgccacattgaaggtgtaatagagaggatagccatcatcaatatctttgcgcacgcgttctttaaagattcggatatcttcagaatctggacgagcgtccgttacagtagctagtcgataaccagcttgatttccacttggttctggatagccaaatagattctgattcaatacgcgaatcgcatctcgattatgagtcccatagggattataagtccccatttccttagctaattgatgttgagagacgctaacccctcgactagccagcatcatatggactgtcgctggagcacagaaataccattcttcttgaagttttaaagaaataggcaatagttttcggatcccttgattctcttgggacgatgttccttgtttgaccgattgagaaggttgcgtattctctttcaatgaagcttgttcctcgcttgaagatggcaaggtttcctgactaccggcttccgttctgccttccttgatttttaatcgctctactacttctgctggcattggtggattaggttctgtacgctccttcgttttttcactaactgtttttgatgaagaggatgtgaccttacgagtgctagaaggacttgtttggcttcttttttgtgtctctgtacagccagataaaccaagcaaagctagaaatacaagaaataaatgaacttttctcatgatttttctcctttctaccattcctgatagcgcattacggagttttcatttcggtagatttcaccttttggaatctcactatccttctttttgaattgaatccatagaatccctttatccgatagtaaaatggggccatgatcatataaataatgaatccgatgctttaaatcccacaaataatattgagatttaacacgctcctcacttcttctttctcccatatatgtgagataaatattgcgatatatggaggtttctgcctgtgaagtagaaaatatcttcttatagtttttattttcaaaggtaaatgaagcgtctttattatttacaaccaagtaaaggagtttgtgcccattcgtcaataaatcgacataatagcgttgatcatcctttgtttgatctataacctttttctgcccatcacttaaggagtaggctacaatttttgtggttaaagctgtgttatcaatttgtacataatacaagtaatctttaaagacattcggaaaaccgctattttctgattcaatcgtctgatgagaccctgtttcaaggtcaaattcttcaatttgatataggctatcgcctacttcataatttataaagagtttctggttggatcgagctacttgagtaactggaaccgttccaataggtttcctatcgatcagtgtcgttaaagatttgtcttttatcttccaaagatagtaaatccctgtctgattgagttgatcatactcttcaaaaacaacaatatcatgatctacatagctaacagccacatgagtcagattagatgtcttttcaacatcttttatcttttgaaagtccttggtatgtaaattcatacaggcaagataattctgatcttcgtgtccttggtcaacagcctcgccataagcaatcccatcatttgacagcgcggtaggtgtaaagattttcccatctggataaggaataggaatagaattttttaataaatcttctgcctttctttcctcgaatcctattttcctagacacattggtactaccggaaggagatttttggggtggccctacaagagtgcaggctgataagagtatgataatcccaatgatgataaaacttaaaaatttttgtttgacaagatcttttttcttcatcagcctatacctcatgaatagctagctataaaagataatgtagaaaatcaaaccattcttcagccatggactagttgagttttatcacttcgtcagctttttcccaaatcactggattatgggttgcgataatgattatacgctcttgattctttaacattaagagcaagtccatcacctcttgtgaggtttctggatccagtgctgcagttagttcatctgccaaaattaaaggtggatcttttaaaataactttagctaatgcgacacgttgcgcctctccccccgataattcataaatcttttgatccagagcaaggtaagccaatcctacttttttgagcacttcttcctcttgctgcttcttctcttttttcgttaatttttgcccaatcaatcccaaatctaaatttttagcgatcgtttcgttttcaagtaggccaaagttttggaagagataacctaattcacgcttaaagaagtgatgctgtttgatttgtttcagttcttgcccctgatagcttatactcccttcttcataaggctctatcttcgccaaaatattaagcaaggttgttttaccacacccactatttccgatcagagcatagaccttaccttctgtaaattgcaagctcaaatcttgaaagacagttcgttggccaaatgatttggttaaatgttctacgctaatcatattaggctcctttcagtacagtggctaacaagtggtcttctttatgagaccggtacaggagaatgaaccaagcattagtaataaatagcaagagagtgacaagagcaatccaccattccgaagtgagaatgattaccaagaggcttcctaatagcaagaggctactttctgagagcaaaatcatttggtgaatgtttacaaatcccagacctgcaatcttcttcaagaagatttgttttctaaactcttcaaaatataggaaattcatagtgttaaaaagaagaacagaggttgctataccaaagactcctcctgcaatcgccatgagattttctatttgtattttttgggccatttgctggtaaacgtccactgcatagtcgtactgactaacacttttttcaagattatactcagcgattagcttcttactattctgaagcccattaaaataaaggtaggaatcaaggtgggtgaaatatggattctcatagcctccaaaactttcaggttgtataaccactaaaacaggatctgtaaagaattgctgatagctgattggtgtgttgttgtagataaagcgtttttgatgattcggaatatacgttacctgcgccttcattgataaggtgatatttccttgatcatctcgaggagatagataatcttcatatcgtttgatcatctcctcttctcgaccttttaatttttccggaagtaacagaccaaattcccctgcttgtaagtgatttaagtgatctttttcttcaggagaaactggaacaccttggatttcgaggtaatttggagttacatagagagttcgtgcaagaggatcgtaatctgtgattgaaaactctttacctgtactaggatccgtcataactccttttggactaaaagatacgaggtgatgataagctaaaagaccaccattttcaatgccagactcgatgagcttagaccattttgctctgttctcaatttgcgtctctttgtttgttttctgtgaaaaatcctcccgacttgtactaatttggacccaattcgactgttttaaccaagcctcacttccctctcggtgagtttgccagactgatccataaatactgattcgatgaatcgcaaggccaattaatgccacagcgagaaattgacaaataaagaggaaaaccaatatgcgcttcaatggaaccttcccttttaaaagggggactaaatgaatcgtttgaatactatatgcaaagaggaaggataagaaaacagacaaaattagtaaaatcccattgtaaataatactactgaaaatgacgatggaataggaaaaaggtgtcaattgaaagcaataaatcagaacagcaccaattatacttgcgccaatacatcccaaaagcaactctatactatcatcttttagagaatgtccgaaaagttgcaagcgtctcattcctgaaatatatcgaatcccagcacttctcatttcttgtgttttttgaataatcgtaaaagagctaaaactaatgataaaaatgactaaggcaagtgattgtgaacctgagccaaaaaaggcaataaaggtcagcagaagatttggtttctcaataaaagtttgtgagaaaccaagagtatgaagagtttgatccagcttttcagtttccaattcacctgttaatacataataattcgttagcaggctttctttggcagccagttctttcttctctcttttaatcccaagaggaagttttccctctccgtagatttcataggtgaaaacaacctgccccttagagtctgttctttgtatctgacgggcaattatactatgattttcccttgccaagtggtctaaactggaagataactcttcatatgtgacgctcttatcttgtcttaccacacctactaccggaagactgcggtggataagcgtatttggagaaataaaggcaatccaaatcaaaaagctatagatgaaaaggtttgataaaataataaaaacacgtttcatatcatcacactttctaaagcagaaaaggaaagtaatacctagctagtcaattaatttcgttgtttaataattactgagttttataaattacagttacattctttgtaagcgaatacacttttccacctttactatactacaaaatccttagtaaaacaataatttctatgtgaaactagtttcaaaaaaagaggctgggacagaagtcctagcctctaaattgtttttattttgtcgagcaagacgcagtggttgagtgggctctactacgccgatttcatcagcttttacagccctactcaactgtgcggaggtgggacgacgaaatcgaattctaacgaattaccgatttctgtcccactctcttatgactttattccaccacagcctcagcaatttcttctgcagtgattcctgcgaagtaacgacctaggttaatggtttgaagggctttaagaacgtcttcgcgttcgtatttgacaccacgaaggacatcttctactgctgcaacatcttcgataccaaagaagtcaccgtaaatcttgatatcttggatctttgattcaatgacattggcaaagatttcaaccttaccgctagggaatttagtgccacgacggacattgtattcaggggacttcccatagttccaatcccaggtaccgaacttggtttccttgatacggttgatttcagccaattcttcatctgagaagacatattctgtcatctcagggtattctttcttcatgtagtccaaaagcaggtcacggaactcttcaacagtgatcttttctggtaactcatcgataatattggtcacacgtgcacgaaccgatttaacacctttagactcaaacttgtctttagataccttgagagcattggcaaggactgacaaatcaacgtcaaagagaaggcaaccatggtgcatgatgcgtccgttgatgtaagcttgggcatttccacagaatttcttaccatcaatttccaaatcgttacgacctgtgaattcagccttaaccccaagttgagccaaggtgttgatcactggagttgaaaagctcttgaagtcaaaggccttgttttcatcttcttttgaaatgatggtgtagttaaggttgttcaaatcgtgataaacagccccaccaccactgatccgacgaaccacttcaatcccatgctctcgaacatagtcacggttgatttcttcgatggtattttggtgacgaccaacaataatcgatggtttgttaatccaaagaaggaaaatttgatcctcatctaacagatgcttaaaagcatactcttctaaagcaatattaaaagcagtatcatttgaataattaataatgtatttcatagtaattccaaaaattcgttttataaatcctactcatagtaagatgagcattagacagaaatagttgaatttcacttgaattttctgaagtagtaaaaagaaatgtaacgataactcgttacatttctcggaaaaattgagacaagtggctcaatttttaggcatggaactctaagagaggtcgctgccgtccgtactacgtttagaaaatttagtagaaagaataatattatttcttcttaggtgaatgaacagccaagccgagtacatccgcaaaagcttcgtacatcacttctgagaaagtagggtgtccgtggatggtcttaagcatttcttctacagtgatttccatctcaatgatggtagaagcttcgttgatcaattcagctgctgctggaccaatgatgtgaaccccaagaacttcaccgtatttcttgtctgcaataaccttaacaaaaccttgagctgcatctgatgcaatggcacgtccgttcgccgcaaagttaaatttaccgatttgaacatcgtatttctcacgagcttgttcttcagtcaaaccaactgctgctacttctggaagtgtgtagatggctgcaggagtcaagttcaatttggcaacagcatgatttcccttaagagcattttcagccgcaacctcacccatacggaaggcagcgtgggccaacatcttagtaccgttgatgtcacctggcgcatagatacctggtacagacgtttccatgtattcattgaccttgatccgtccacgatctaattcaaactcgacttcaccgattccttcaagatctggaacacgaccgattgaaagaagagctttgtttgcgatgatatcgtcttttccttcaaccttgatacggagtttgccatcttcttcaatgatttcttgcaatttcgtatccgtcaagatggtcatacccttgcgttcaaggattaaacgaaggttcttagatacttcagcatctatagctggaacgatgcggtccatcatttcgataaccgtaacttttgaaccgaaagtcatgaaggcttgaccaagttcgatcccgacaaccccaccaccgatgatgacaaggctttctggtacttcgttcatttcaaggatgtcgtcactagtcataacaagggatgattccataccaggaacgttaatcttgctgactttagaaccaccagcaaggatgattttcttggtttcaagcaattctgagccattgaccaagacattcttatctttagtgatagtaccgacacctttatgaacatccactccgtagctacgaagaagccctgcaacaccaccaacaagggtattaacaactttagatttagtttctaaaagtttatccatatctactgagaaacttggattttcgatgataataccacggtttgccgcatgaccaatattttcaatgatttctgcgttgtggagatatgtcttggttgggatacatccgcggttcaagcatgttccaccaagttcagatttctcaacaagagcaactttaccacccaattgagctgccttaatagcagatacgtaaccagccggacccccaccgatcactacgatatcataagcatcatcgctcttattgtcatcgtttgaagcacttgctgcagctggtgctggactcgattctggtgctgctccagcggttgggatgttttccccttcttcaccaaggtaaccgattacttctgttacaggaacagtttctccatcccctttcaggatagcgatcaagtagccgtcttcttccgcttccaactccatgctgactttgtctgtcatgatttcaaggagcacttctccttcttttacaaattcgccgacttttttattccactgaacgatttgtccttcggtcatatctacgccggcttttggcataattacttctaaggccattttatttccctctttttcttgtttctattctctcgttgattagaccaacattgaaatcgggtcttcaatcaaggctttcaagtctttcatgaatttggcaccagccattccatcgacaacgcggtggtcaatggtcaagcccaagctcatgattggacgaatgacaatttcaccattcacaaccactggtttttcaaccgttgcactaactccaaggatggcagagtttggttggttgataatcggtccaaatgattgaacgccaaacattcctaagttactgatggtaaaggttgagttttgcaattcacttggagcaagtttaccatccaaggtacgtccgataacgtccttgaaggctacgaccaactctgacaaagtcattttttctgcgttatagacaaccggtgtcatcagtccattgtccatcccaactgccatcgctaagttgacatagttgtgagtgatgatggttttgccatcttctgtcaatgacgcattgatgtatgggtgtttcatcaaggtcttaaccactgctagagaaagcaaatctgttacagtgactttcttgccagtggcttccatgattggatccaatactttcttacgaagggccaacatttgagacatatcaacgtcatagttcaaagtaaaggttggtgctgtcaagtaagattccaccatccgttgagcaatcaccttacgcattggtgtcatcggaatccgctcgatctcaccataaggtgtcacattatcaggaacttcttcgactttctcaatttgagcaggtgacttaatggtctcattctcaatattttcaggaaggaaagcaaggacgtccttcttcataatcttaccacgatgaccagttccttggatttcttgccaagcaatattgtgttctaaagcaattcgttttgcaagtggtgaaatgcgaaccacatttgtgtctttataggtttccacgtcttctttgtggacacgaccgtttgcgcctgaaccagaaacatcatagaggttgatcccaagatcaaccgctaattttctagccgcaggagtcgctcttagcttatcatcagccatgacctctcctattctattataagatatcaaggacgtagaggacaaagaaaaaataggagattgacgctgtgttcgatgaacacaaggaaatctatctttttttcacagtcctccgtccggattcagttacaagatactaagggcgtttaaaagcgaccgaaaaataggaaatcaacgcagacttcgatgaagtcaaggagatttatcttttttccgagcttttagcccgtgctctaatctaagatattaaggacgcagagaactttgtaccttaaaagatacaaagtttcctcgtctaattcaaatgatattacataatttatgttatgtattattctttgttgtatgttttacgaatggcatctttgatgctttcaactgttggaatcattgcattctcaaggttttgtgcataaggcattggcacatcttcccccgcacaacggcggattggtgcatccaagtaatcaaatgcttctgattcagaaataatagctgaaatttcaccaatatagccacttgttttgtgggcatcattgacaaggactacttttcctgttttcttgacagagttaatgatgatctctttatcgagtggaaccaaggtccgtggatctactacttctactgagatgccttcttctgccaattcttcagcagcttgcataacgcgacggagcatttttccgtaggttacgacagtgacatcagtaccttcgcgtttgatttctccgacaccaagtggaatcgtgtagtctggatcaactggcacttcccctttttggttgaattctgatttgtactcaagaatgataacggggttgttatcacggatagatgacttgagcagtcccttcatatccgctggagttccaggagctacgacttttaaacctggaatatgcgtaaaccatgattccaatgattgagagtgttgggctgcagatccaactccgttaccagcagcacagcgaatggtcattggtacttgaccttttccaccaaacatgtagcgagtcttagcagcttggttaacgatagcatccatggcaattactgagaaatccatgaaggtcatatcaacgattgggcgaagtccggtcatggctgcacctgctgctgcacctgaaatcgcagcctcagaaatcggacagtcacggacacgttctggaccgaattcctcaagcattcctactgaagttccgaagtctccaccgaaaactccgacatcttcccccatcaacaatacattttcgtcgcgacgcatttcctcagacatagcaaggataatggtatcgcggaaagacattaatttagtttccataattctctactcccccttagtctgcgtaaatatcttcgaaagctgattcaagtggagggaatgggctttcttccgcaaatttcactgaagcttcaactgcttcttttacttcttcttggatctgatccaattcttctgcgctcgcaatctcattttcaaggagatacttgcgaaggttttcgattggatctttcttcttccactcttcaacttcttcacgtgtccggtatttaccagggtctgaagatgagtgaccgagccaacgataagtgacactttcaatcaagacagggcctttaccagagcggacatgttcaacagctttttggaatccttcatagacatcaataacgttgtttccatcaggaataaacataccaggaatgccataagcagcactacgctcatgaatatgctggatattggtcattttcttgatatcggcagagattccgtaaccgttattgatacagtagaaaataactggcagattccagatggaagccatattgaccgcttcgtggaagacaccttcgttggttgcaccatcgccaaagaagcagacaacaatcttaccagtctttttcatttgttgtgtaagggcagcacctactgcaatccccataccaccaccaacaatcccgttggcaccaaggttaccagcatccaggtcagcgatatgcatagagccacctttccctttacaagtacccgtatatttccccaggatctcagccatcatgccattcaaatcgattcctttagcaatggcttgtccgtgtccacggtggttagatgtcagcaaatcatcatcgttcaaagccaacatcgctccaacgttagccgcttcttccccaacagaaaagtgcgtcattcctggcacttttcctttttttactaactgtgcaatttttaagtccatgcgacggatttcttccattttacggaacatatccaataagagacttttatctaatgttgccatcatttcgcctttcttagcatttattcattctctttcattctagacaaaaatgaaagcactgtcaaaaataatgctcaaatgatttcacaaactttattccttggaagatggttttataagctttttaaaattcaaatacaatatttcacaaacttatcactcatgactttgctatacatataaaaaaaccgataggatcctatcctaccggtcatcatcttatgattggcgttggccaaagtcatgaatcatttgttccaattcttcacgactaggtgtagtaagcatatagaggtaatctccctgaagttccgcaaaggccgctggcatgtctttcttgacacggaattgatcatggtatttagccaaaacttcatcctctgaaaggacataggctgcattggcacgacgagaagttgccaagcaataaaggggctcaaactcagaagctgggaaaggttctcctgctacgatggcagcatagccacggtacaaatcaatcgagtgagcgtagttgtagacatcgatggtaaagccacctgcagggcgattattgtactcgatcgcaatatagtcatccccatcgcggaagaactcaatgtggaagaaacgttccttcatgccaaaggccttgacaatggcttccccgtattgacgcaattttggatccatctctttaaggacataataagagttgtccatcttgtagagcatcaaatcgagtggcgtataagcatagtcaaaagtcgttgagaagacaatgttgccatcgctatcgaccagaccatcaaaggtacaaatctcgctagaagtgacgaatttctcaaagaagtactcggtgtggccatcccactcagccttaaaatgatccacatcttctggcgtttcgatcttgaaggtcgctgctgctcctactccattgtcaggcttagcaatcaaaggcaacccaatcttcttcacggccttatcaatgtctttttctgttttaactacagcaccaggtacgactgggactcctgccttcttgaagagtttcttcatttcggatttgaacttggttttcttcaaatcttttggcttagccccgaagacattgaattgctcccgaagcgccgcatccaattccaaccagtactcattatgagactcaatgcgatcgattgggccatgtttataaaagagaaaggctaccgcacgcttgacttcgtccagattttccaaattttcaacacggaaatattctgttaagctgttgcgcaaaggctcatctaactgttcatatggctcttgaccaattcccaaaacagtgatccctttattagctagttcgatggtaaattgttggaagttttgtgggtaatatggtgaaataacgatataattcattgaggtctcctccctttttacttatagatacatttggcctaggaaataaggcatttgtttgcgccaccattcccaatcgtgggctacatcgtgtccccattcagcaaaccaagcaggaatatttttctggtcaaaggcttctttcagtttgtagaaagatggtaggccatcctgttcccaagcgccaagaccggtacaaacgacaatctccgcctgacggtaacggtcgataaaccagccatcattttgatgccaaatgtaatcagatggagaattttggtaaatcgcttcatccccaccaaactcaccaacaaagaaacgagcatcatagataccactcaaagctacaactttgttgaaaacatctggatgttgcaagaagaaattaagggcatggtaggctcccatagagcaaccggttgtcatcattgggtcaaaccaacccgttttgtgcttaatgaaaggaatggcttcttcaatcacgtagcgttcataggcacgatgcatttctgcacggtcgtgagggtttttccaattacaaagccagctttcactatcgacacttgaaagggtgaaaaattgaacccgtccttcttcgatgaactgagcacaggcatcaatcataccaaaatcatagtattcgttatggcttccacctgatgaagcgaagaccactacaggaatccctgcatgtccataacggtttagatacatttcgcggttaagttgaccactccagtggcttagatgttcaatattcataggttccctctttctttatgataaaaatttaaaagcttctagtcccacttctctgctaagaaacgcagacattccggtaaatgctctgcccaggcctcttcatggtggatagctccagactgaatccgaatggcgatattttctaaagctactccttgttgaatgacatcatgatagtaacgaagagatgagtcaatataggcttgcttgatattccctgccatcagggttttatctgtatcatccgcctcttcagtccccacatagatgtagatacgttgatctgcataaaggttcttccgctcaatatagcggtcaaaagtctcttggtgtaaccagttagcagatgagaagactcccagacaaccgatttggtcttggtattccaagcccaaaaattgggtaatatttccaccaagcgacgagccaatcatggccgtatgttctcgatcagcaagagttcggtattcttggtcgataaaaggtttcaccacctccatgacaaattcgccgtactcaacgcccttgccaccaaattgcatgccaggaatattagattccttgtacttccaggcagagtattcattcatccgttgcaaaccatcgttatcaatcgcaacgacaatcatgcgactaatatcgggattccgcttaatggctggaatcaccttccaggaatgacccgcataggcctccttgctatacaaaacgttttgtccatcgtggaaataaacaacagggtaacgtctgtctgtatccgtttcataattcttaggtaataagactcgcacacgacggagttttccggtataaggcactttcaactcgtgtgtcttcatatctaaataaaaataggatttgttcattgtcagaaaactctctatattctaaattttattcattataccatttttagaagaaaaagtctggattttctccaaactttttcctttcttgggttatttttccataaactgagccaaatcttgtaaagaacgttcggcaattttctcataccgttcctttttatcccgaatgcgtgggccttctagctccttgataatcccgaagttgacattcatgggttggaaatgtttgctgtcagcatgggtgatatagtgagccaaacttccgatagctgttgtttctgggaaaatggccgcttcttctcctttgaaaaggcgagctgcattaatcccagcaaccaaacctgaggcagctgactcaacatagccttctacccctgtcatttgacccgcaaagaagaggtttggttgtttcttcgaacggtaggtttgttcaagcaaatttggagagtccatgtaagaattgcggtgcatgactccgtatctgacaaactccgcattttccaaacctggaatcatttggaaaacccgtttttgctcaccccatttaaggtgagtttggaagccaacgatattgtagaggctagcagccgcattgtcttggcgcaactgaacgactgcgtaaggtgtcttaaactctccatcacgtggacctttgtaatcatctggatactcgagtccaactggcttcataggaccatagagcatggttttgataccacgtttggccatgacttcaatgggcatgcagccttcgaaatacttttctttttcaaaagagttgagcggggcttcttccgcattgaccaaagcctcatggaaatccataaactcttgtttggtcatgggacagttgagataagccgcttctcccttgtcatagcgtgacttgagatagaccttgttcatatcgacagtattgacatcgataataggagctgctgcatcatagaaatagaagccatctccaccattaagggcatggatcttctctgccaaggcatcactggttaggggacccgttgcgaccactgtaatagcatctgtcggcaattccgtaatttcatcacgaatgacttcaatgagagggtgttgggacaccttctccgtcacccggctagcaaacccttcccggtccactgccagtgctccaccggctggtacacgagtcgcttcagctgcttcaaggatgacagaacccagacggcgcatttcttctttgaggagaccgacagcattggtgagagaatccccacgaagagagttggaacacactaactcagcaaagttatctgttttgtgttgcggagttgatttgaccccccgcatttcgtaaagcttgaccggaataccacgttctgcgatttggtaggctgcttccgaacccgccaatccagcaccgataacattgatataagattgagacacgacactaatacctctttgggtatcaaaacacccttctggactgtttgacacccacaaatctttctaattttctacttggtccattataccaaaaagccaagtaaaaagacagggaggcttttccttcctgtctagactttaactaattattttcttataaacacaaccaagctgctaagagggcagagaggatactgaataaggacccgatcaagtaatactccgcaaaggctggattttccgaaattttattgtagcgagcgatggacttggctgtaaagactagaccgatcgaagcaaattgcccatagacgagacaggcgccaatcaccaaacgctctaaaaaaccaatcatagaaccagccccagtgatcgtatccattttcttcttgctggttggttgatacttggcaaacagaattttaaaggcaatattgcttggtttcccaactaggaggacataaaagattagatttaaaatgtccaaaggcagataggtcgaaccattcttcgctcctaaaaggactagacagctaatgatgctgatatgcaagacttgatccaatgcaaaaatccaggcggttggtaatttcaattgcttctgcacgataggtttcaagaaatctattgcggcatggcttattaaaacgactaagcaaatccaccacaagtctagatgaaagagcgaaacaatgaacaaaggcaaagccacatacagaatgtgaagcccgagcaccttcttatcctgatccttgcgatccgccatcttctgactttgaaaataataatccgataacaaatgacaaatcaacaaaagaatcaagtatggattcgttacgatactagacaatccgctcatgggcctctcctttctctaatctttgaatacaagctagtgctgctgctcgtccccgtaaataaacacgaatactactactctttaagcgcttggacagggcacttgggttaagccccagcgattgggccaaatcttgctgactaaagttttcactatagacagatctctttagcagattgagcaggatctcttcctgactctctctccagcccgaacgtatggcctctccagaagcgatgagcgcattcaccactaaatcctggctgtcattaccgctcaaaaaatagatctgggtattgccataatcatttttctgatggaccagattaatggctgcgcgtgcattccaataggctggtccatctgcaccgatactttgcagaggatcaatatccgttacaatctccccgaggccaatgccgaaacgaagttgagtcggttttagttctgaacgcaaggtatcgataatttgaaaaacgggagcctctactttcaaaagggcctgaaactcatcgcccaaagttaaggtaaaagccgatgctaggcagtctttaaaaagctcattgatcttttgaagcgttttttctaactgtttttgcaggtcaaaacgttcttgtacgattttggaatcaatcacatctgcaatcaaagcaagatacataagcccacctccttgtgtctattataacgaaaaaaacaaaaaatgtctattataacagacatttataaaaattgccgttataatagacattgaatcgtttgaaagcttatttcactttttcttcttcgtagtcgccattgctacatacgacttgtttgccgccaccacgaacttttttctcaactaagtagtggccacattttggacaatcccgaccgatcggcttatcccaagaggtaaattcacactctgggtagcgattgcatccatagaagatacggttgcgcttggttttgcgttcgatgatttgtccctgatgacactcaggacactccacgccgatttctttgacaatggcctgggtatgacgacaatctgggaaattgctacaagcatagaactttccaaaacgtcctaatttaatcaccatcgggcttccacaaacttcacaatcaaaaccagctggttcgtctttaatttggattttttccatctcttcttcagcctttgcgacctctttagaaaatggtttgtagaaagcatcgatgaccttttgccactcttcctttccaagttcgacatcatcgagtttcccttccatctccgctgtgaaggtcacgttgacaatatctgggaagaattcaacgatcagtttattgacgatctcccctaattctgttggttcaaagcgtttggctaccagcttcacataatagcgtttttgaatggtctcaatcgtcggagcataggttgaaggacggccaacaccgttctcttccaaggtcttaatcaaagtcgcttcagaatatcgagcaggtggttgggtaaagtgttgctcaggcttgctattgacttgcttaacaatatcgccttctaccatatccggcaacatcttgttcttatctgagtcgttataaatagccaaataaccatcaaacttcacctggctcccatttgccgtatactgaaccccattttgacctaaacggacattcatggtatcaaagacagctgctgtcatttgactagctacaaagcggttccaaatcaatgtgtagagttttaattgatctttgtccaagtatttagcaatgctttcaggagtattgaagacgctagatggacggatcgcctcgtgggcatcttgggcaccagaagcattcttcacacggcttccatgcttggaatatttctcaccaaagcgatccacgataaagttagccgcctcattttgcgcaactggactgatccgtgtagaatcagtacgcatataggtaatcaaaccttgaacaccagaaccaatattgattccttcatacaactgctgggcgaccatcatggtcttacgtgtacggaagttgatcttattggcagcatccatctgcatggaagaggtggtgtatggaagtggcgcattccgacgacgttctttcttttcaactttttcaacggtaaaatctttgccatctaagtgttcaagaacagctttcacctcttcattggtgttgagcttcatcttcttgccatcaatcccatagaagctagcttggaattgcttagtcccttttttaaagacaccatcaatggtccagtattcttccggcttgaaatcattaatctcattttcacgatcaatgattaacttgagggcaactgattgcacgcgccctgcagaaagtccttttttaacctttttccaaagaataggcgaaatggaataccctacaatccggtccaagacccgacgtgcttgttgggcatcgaccaagtccatatcgatttggcgcggttctttaaaggcatttttaacagcatccttggtgatttcgttaaagaccacacggtttttttctttggcatccaagttcaaaatatgcgctaaatgccaagaaatagcttctccctcgcggtccgggtcacttgcgagaaagacttgtttggcttttttagcttcttttttcaaatcattgatcaagggaccttttccgcgaatattgatatactccggttcatagttattgtcgaagtcgatcgacatcgtagattttttcaggtcccgaatgtggccaacactggccatgactttgtagttacgaccaaggtatttctcgattgttttggccttcgcaggagactccacaatcaccaaatttttcttggttgtactgcttttcttttttgttaccacgttttatccctctgtattgtataaatctcattgagtttaatacattttaagaaagatgtcaactaggaacttctcctataggaaaatcacaatttgtatttcaattcatcaagaatgtcctggcctgaggtgacaagttttgcgccttcttgaatcaggtgatggcagcctgcagatttaccatctaaaatatttcctggaatagcaaaaacgtctcggccttcttccatagcacgctcacaagtaatcaaactccctgaacggagtcgagcctctgctacaatcactgcctgacagagacctgcaatgatgcgatttctctcaggaaaatgaaacttaagaggggcctgccctggtccatactcactcaagatcagatggtgttcccccatatgtgcctgcagtctttgattgctcttaggataagagacatccagtcctgttccaatcactccgatggtcttgccaccattgcggatactggcataatgagctgtcgcatcaatccccttagcaagtccactaacaatgaccagttcatttccaagttccttaattatcttctctacagaacgaaccccttctcgcgtggtctcgcgagctccaacaactgcaatcttcggtttgcttaacagttgcaaatccccttggtaaaaaaggagtacaggaggattgaagatctgtagcaattcctcagggtattcaggatcaaaaatggatagagatgggaaccgttcaaactccttgtgtaaatgctcttcatccagctgccggtatttgtctacaaaatgaataatactgcgacagcgagcgatccttgctatctcttctaagcttggtaaggcttggtctttcctacagtagtccaaaactctcaagacttgctcatttgataaaccagcttcttttaatttaaagatttcaaatttctccatggtcaccttctacttcctctcacttatttattcgaaaaagaatggaaaaaaagctctatttctagaactttttttgatatgtagaagaataaaagtaagatgcggcaccaatcaagttgctttcattatggaagcgagccgcttggatcggcaaggcctcaaattgtttatgccctttttgagagagtaggttatggtattgtcgactgatctcatcgatcagtagcggttggctactaatgccccctccaattgtcaccttctcaagcaggagcaatgattgaagattaaaaatcagaatagcaatatcatgacaatactcccgaaacaaggatttcagctcctcatggcctccttgatcaagagccttgaaaacggctataccatctgccttttctaggtttaagatgtgactagccttctcaacaaattgaacagctgaaccggtgttttccaaaagattggaaataccttgcaaaaagagttcacgatgaaagcggcgattttctggtgttctttctgccttatcaatagaccgaatgtattctgtcagttgccatcctctcaatagatcaccgttagaaagaagagcaaggccgactcctgtccctaagaccaaggtcgcaccgcaagaacaatcttttagattaccaagccttgcttctgctagaccagcggcttctccatcattgagaacagtgacgggtacttgaaatgtttgttcgagtctacttgctagaggaatgccgcgcaaatatggaatgagaccacctcgaaagacaaagccaaggctcttttggatctcaccggggcatgaaatggcgattccctcgatttcttcccttacgggtgtaacgatttcttctaatccttgccaaaactcctcaatcgtaggtggtgttgggatcttgtctgtatgaaccaattgatagtctgcgtccatcagaccgtactttataaaggtaccaccgatgtcgatagtgaatagcataacctaatcctcacacattgatttgacgggttcaaacgaacgccgatggataggggtcactcccagctggtcgaggccagccagatgcttagctgtcccatagccagcgttctgtgcaaaatcataacccggatattctcgatcaaagtcttccatcatctgatcccgagtcaccttggctacaatagaggcagcagcaatggataaggagttagcatcccctttgatgatactagtttgggaaataggaagatctaacttcatagcatcaatcaaaagatgctggggttgaggctctagctgaccaatggcttccatcatggctagcttcgtagcttcatagatattaacctgatcaatcacgtgattgtccttgacgccgactccgatcgcaatggcgttttggagcacagcctcatagatttccttgtgtttggcttttggaatctttttactatcgttgagccctggaatcttacaagctttcggcaagatcacggcagctgcaacaactggccctgctaacgggccacgtcccacttcgtctactcctgcaatgaggtgaatcccttgagtataaagttctttttcataggctagcattttttccaaacgcaaatcttcgtccacttgtttttggagttcgcgttttcgtttgctgatagccgcttgaacgcctgctcgaccatcaaggatcaactcttcaaataagggatgatctagctcgtcaatcattgccaaacgctctttaacttctttaatcgttgacatctatttcacctacgcgatccagcgtataccgtcccaatttcccatcgcgaacatctttgacaaagagttggtaaaaacggtcgtaatcctctcgaaagcctaatttctgggtcatctccataatgatttcaggagcttcttgttccagatccatttgtttaaaacgttcttgcaaaacagctggataatgctctttaaaatagttaaggccaaaaatggtcacttcatccattggaagcaactgatccttgatggcgcctgttaaagcaagttttaaggccacttcttcatcttcaaacttgggccagagaatccctggggtatccaagatttcaaggtctttattggttttcaaccattgttgccccttggtcacccctggtttatttccaacaacagcaatctttttccccgctaagcggttcatcagagttgatttcccggcattaggaatcccgataatcatggtccgaagggtttcaatctgaatacctcgttccttctgacgggcaattttatcggccatcaaagacttagcagcatctgtgaccttcttaaccgtagattgctctttggagttgatagccaaggttttgatgccttgagactcaaaatagtcctgccattcttttgttgccacaggatctgccaagtctaccttgttcaaaatcattaatttaggcttatcaccaacaattttggttaacataggattttggcttgataggggcaaacgagcatctaccagaaccgtcacaaaatccacgaattttaaattttcttgtacttgtcttctagctttggacatgtgtccaggaaaccattgaatagttgccatgttctccattcctttccagttcaatctcttctattataccatgttttcttgaattctcagccttaaacgagaatacaaaaaatgaagctacctaggtaacttcatttttcttctattctgtccaatttatcaacgatttcaattgattgtccattgtataagtataggtgtcgatatttctagtaaagtagttcttcaagtcattctcatcagacatgctttggaaatcgtacttcttagcatttttctcaaaggtttgaatggtttttccaggttttttatgaacgttggcttttccatggttttcgacctgttcaataaccgctatcttggaaatgacaaaataacttgtttttgatttaccataagatgtatcggtaatagagtatacatagaccaattgagggattttggaatcaaatgtacctccccaatcaactccatctttgattgccgcaaaagccatcccttcaaattttggaaggtctttataattgcggtcagctgcataagcctttgctgcatcctctacattcttagagatggcttcttgtgtatccttatccacttttgacaaggaagtcacataagccccttcctcaaaatcagccaaggtgaccttgtatttcttactgtcttttcctttctcaacagttttaccttgttctttcaatgcatttttaccactttcattgagacgaatctcaatttcatctccaactgcaataggatcattacttgatacttctttaccgttcagataataatcaaatgggaagccatagttagcggttgcttttgcaataatttctagatcttttccttcaaattgagatggttttgataaacttccatttggagaaatgcccttgatctttggataaaaccctttaaagggatcaatacctacaagcgggataagatccgcctccttagttacagatgtaccagtaaagtgaaggccaggtatcatgtcttcaagatcatttttatcgtaaagtaatttgaccgtaattttatcatgattatttaggttcttgcgatcttttacatcgatcagttcatcccctttataaacactaaattctacttttgaaactagctgatcgatattgtagtttgaactctcagtattcaagccttccgcttctaacttcttcttgatatcccggtctaatttttccttgttcaaactaggcgacttctcaacaatagatccttcaccatcagttcctttaatttccagattcacataatcttctaaattaatggtgtcactgctaccacgatttaataagaaataacttgcaagagaaattacagtaagaagggcaaaaatccctagtaaaattcctatcatgtttcttttgttttttttaggtgctggggattgagttggacttggccctaattgcactgtctttggttgaaacgcaacagcttttggttcagcttgggtagctacttgaactttagctccacacttagaacaaaatgcatcaccggcattaataggtgcctggcaattggtacagtttttcataaatcatctccttattgtttatcgagcgtccttacggacagaagtcaatacgagggaagttgcgactataaatagagcggcaaaagcaagcaaggctccccaatttccaagaatcgcaagtagatcataagcataggttcctaccccatctttttgataaacttgccagtcagtatgaccttgagacgggaccatattgttcatgtttgcaatccgaaagaaggcagttgttccccatctcgtaatggtcgcgtgtgagatccacactaaaaatggaattttttcatccaaggattggagaaaatttgaaaacagcaattgaaccatcaatactagcggcatggctgtcatcgcttgagatgatttttttacaaaagctgaaatcaataaggccaacatatccgaagtaaagatgactaaaaacaatgtgatccccaaaaggaatatctggctaccgtttccttggatacgtggatagcgcacaacaatggttccaatcattaagatcgcttccgcaaaacagagaaccaactctgtcagcacgcgcgccgtcacataggaaggcaaggacaagcctttaatttggtactcaaacttgatgactttacgctcgttacaaatactggtcactgaattaaagagaccaatccagagtgctgcagaaataaacataatggaagaagttctcgtaatatggtatttatcaaaaacttcattggcattaaaagcgatcgaaatgatgaaaggaagaagaatcgcttctaacacaaaaaacagagattttttattgagaaggagtcgaaggaattttctaaaataaatcgagacttgcttcttatccagcatggccacctctcctttcattttcaaaccattgaacatattggtcaacaagagctgcattttcagcacctgaaattttatggacgatttcttccaaactctgagcagcaaaaactttcagcgcattgtctacggagccaaagtaacacagtctcccacagccttccgagctctttccgaccaccatgaccttgtcaaagagatgacgaatacgatcgggcgtatgcgtgatgacacataagatctttccttcatctgtaatctctctcaatgtggtcatgacctccatgaccatgctcccatcaacaccggaatccggttcatccataaagaggatttcagggcgcgtgatgtattccatggcaatcgtgagttttttcttttgtccgccagatagagaagaacacttggatcctttgacagattctaaatccagctttttcagaacagatagcacttcttctttacgaagttcaggattgtctgctaattcagatggaccgtagagctttgctgcatcttctagattcttatagaccgtgtcttccattcggtaatgctcgtcaggggattgaggagccagggtgatgaccccttgtttcttcccatcgtttaacaaatcaaccccattaaaataagcactggtatttgaatgaacaagtcctgtcactgcttccataaaggtagattttccagcacctgatccacccagaattaagatcatttccttgggtttaaattccacctgaatatccttgaggatggttttacggtttaagagagttccgactgttacatcttgaatagcaatcgttagtgatgaatgagaaaagttctgacgatccctcggtgaaacggatgggtctgcagttgctgcctgaagatcttggtaaataatctgatctcctaattggacaaccaactgattcgataagactgcacaatcaatcctagcaagcgaggatagatccatcggaaaagcatcttttgcaatggtcttccattctagagatttcatttcaacaatgatgaattttgagcgaaaaacatggccgtcggcgtcacaaagatggataatggaacgatgatttaatataacacgttgatttttcggataggtgacaccatccacctcgatcatcccagacaaacattcaagaaaccattgaccgtttaaaaaatggaaaacagctttagaaggggactgaaaatcatcagccagatgcaaatctgcctgacttccttgagaaataccatcaacgctcaatccatcaaaaagtggaatagctgtaaaatcctgattgagataggtatagatggttgggttttgcatacatgtaaacctttcgaaataaactaattggctagacagtcaaaaccaccctataagggtggttcaaaacgatagctctacctagcgagcactactctagcttagcgaatttgctcaaaatgcaaatgcacggcgatgtgatcaccatagccgctccgttccaaatcacgttgcaagcgataagaaatgtagtgttctgcaatggtaatataaccagcaccaagtaagcggtgctcaaccattgactggatcatgctgatcgtcgcacgttccactttagcttcttccaaatccatggcaactttcttggtcacttgcgccaagttttggcgaagatcatccgtcaagacataaactgtttgtgctgccttcaaaacagcttgatagattttatctgggtcaaattctacaacttcaccactacgtttaatgacttccatcttattctccttgattatcaatatacttctattatcttaataaataggggatttgtcaagaatctaagacatcaataatccgggcgaagaactcccgtaatgatctctttagtagcatggtaatccccatctactacaaccttgataatgcgcttcgcttcttctgccggtgctggcaccaatggcaaacgggttggccctgcttcaaagcccatatagtttaagacagctttgacaggagctggactcggatatgagaagagagcgttgactttagggataaattgacgttggatggctgcagcctttttaatatcattgtgttcaatggcttggaacatctcatgcatttcatctccatttgtatgagaagccactgagatcactccatctgccccaaggttcatcgcgtggaaagcatccccatcttcccctgtatagacgagaaattcttctggcttgtgttcaatcaaataggccatattagccagggttgtacactctttgaccccaatgatatttgggtgttctgccaaacgaagcatggtttcaggcgtcatttccacaaccacgcgtccaggaatattgtagataataatcggaagattagatgcatccgcaatcgctttaaagtgttgatacattccttcttgggatggtttattgtagtaagggacgatagccaatcctgctgcaaagccaccaaaagcatccacttctttaacgaactcaatcgagtcgcgggtttcattggttccgacaccagcgatcaaagggacccgtccattgacaatcttttgaacagccgcaaagagttgcaattcctcatcgtgggtcagagttggactttctgcagtcgttccagctaagagaatcccatctgtatgatgtgccaagaggtgctcgatcaaggcaggaagagcgtcaaaattaatggttccatcttcatggaagggagtgataaatgcagtgatgattttacaatcttttaaatcattataagacatagaaaaacctttctctatataagaaagaggctggggcatgcttgcctttgcctcatgatctgttcataaaacaagttgattcgctaaaaagatgagaaagaaatcaaactcttcgagttactgatttctgtttcgctctctacttcaactcaaatttcaattcagctgttggacgtacgagtccacgttcgtgaagggtttctgcgatttggactgagttccaagcagctcctttaaggaggttatctgaaacaacccacatgtggattcctttttcagcatccaagtctttacgaatccgcccaacgaaagtatcgcgtgaaccgaccgcattaacggcttgtgggtagatttggtgagcaacatcgtcttcaaggactgcacctgggaattctgcaatagcagctttcacttcgtcaattggtgccacttcttttgtttcaatgtagactgactctgagtgagctgacaagactggaatccgcacacaagttgctgaaacggcaatgctatcattttccatgattttcttagtctcgttcgtcatcttcatttcttcataagtatagtcattttctgtgaagacgtcgatttgtggaagagcgttgaaggcgattggatagtgtttcttatctccacctgaaggtaagatttctgctttaacatcacgtggattaactccatcatttaagacttctttcaactcacgttgggtttcaagaatagctcccataccggcacctgatacagcttggtaagtagatacgatgatacggtccaagccccatttttgacggactggttcaagagctaccatcatttgaatggttgaacagtttggacaagagatgattccgttatgagcatcaagagcatgtgcattcacttcaggaacaaccaatgggacatccggattttgacggaaataagaagtgttatcaaccactactgcgcctgcttttaccgcataaggtgcatatttggcagatgttgaaccaccagctgagaagagagcaatatcaaccccttcaaaagcatcttcagtcgtttcttcgatggtcacgtcttgccctttaaattgcaagacttttcctgcagaacgtgcagacgcaaggtagcgaatcttatcgattggaagagtagattcttccaacattatgatcatttgagcaccaacggcacctgtagcaccgacaacagcaactgtgtatcccatagtaaatcctctttcaaaattttctaaaaattgagtatttgtactattatacaattttttggcataaatgaaaagtaccaacagtaggaaaaaatcctgattctaagaccaggatttttaatggttatttatcataaaagatctttaattcaggtcatagttcaaatcacttaaatctttcttaccttgtgtttcttcagcaagaaatggaacttgatggatcccctttacacctgctacgatagacgctggaaaggaaacaatttcttgattgatgtggctgacattactgttaacaattcgcttcgctgcagcaagatcttcattttcgtcagcaatttccttttgtaaggtcaagaattggttagaagacaagagctctggatagttttcaccgactgcacgaatttgtgccaagacatcattttgattggtaataacttggttggattcttggatagatgctccttgacgtaaagcaactaaatcagtaaaaatctcttgctcatgtttggcataagctttggctacttttagcatttccgaaatggtatcatagcgttttacgagaacgatatcgaccgttctctttgattcttcaatggtcactagatagcgattgagacgatttcctacactaataaaccaaatagccaatagggcaacaaatatgattaagccgataatgagattcatgatgcttctccttcaaaaattgctgttatttctttaattaaagctagttctctgcataatttatgatattcagataccaaagatagttgatcaatatcttccggtttttggggcgtcggaaagatatagcgatcggtatacaaagaaataaatagtttcttgtctttcaaaaatacacacatggcattttgagaaatttgtcgatcaaaccattctaacatcttaggggtgagaaattttcgggcagacagttcatccgtgcagtaaatattgtaattctcgttattgcgaatatcctctgtttcaatctgaacttcatctcctctggctccaggataaaccccattcacctccctcttaaaaagaaaggatttcttggttggcacaacccgaagatgaccggagaaattgatcggtagacataaagagaacacttgtccaaggaaatctgtaacttctacatgttccgtcctcgtatgtccattagatgtccgataacgagtctccgtatgatgggcatagagatttgacaccgttagctctttgtcatcatgaaacgatagttctttgaaacatagaaaatcagtcgaccgaggacataaatgcgagagagtttcagaagggatggaaccgtcctctttgatcgaagctcgaggaaaaacttcctttaatacaggcgaaaggatatcatcaagatagatctcatcgttcgaacgaattcgatccccaaacaaggcttttcgttttttatattgtggccaataatacaaaccaacaactaaaaggatcaaaggaatagctgcaaaacgcaataaaatgagagacagtatggcgcaaataataccaaaggatcgcaaaacattccacttaagattgttcttcatctgttctcggatcaatccgatggcatcctgaaattgtttagagttttcaagctcttcaattttctgcgaatagtctgtagatgctgaatcattagaatgatagaaatctcccaatcaactccactcctttctgacctaggcactttactatattataacaccaacataactttgtagcaactgtattataatagttttcggttctttgaggaaacaaaaaaatcctgatccgaagaccaggattcgaggcacctttcggtgagaacagcaggttcacacaactgttcaaggtccgctcctgcgttacaattgaatgtagacctcctcagcgcaaaaggctccaaaggagccaatcgactcatcgcatgaatctagtttaccatgaacatccacaaactgtcaagaaggtaagtacttgcttccttcccgaatgcttaatggtgacaactgatctcgatagcggtcgataaaggcccctacccaatccggattgaccttggaatagttgcgtaagctccagccaattgccttatttataaagaactcgctttgacctagattattgaggatcactttttctaacaaatccgtatctgttttttctttcctcataagctggtgatcaatggcaatccgcctcaaccaaaagtcctgatccctactccaatccagcataacctgtttggtttctggaaatgtgaaagtaatctctccgatgatgcggtccaactgatcaatactatcccaccaggacttggtttgagccaattcctttagctttggaaaatcttcaggtctaagctccttcttctttttatccagataatccatagcaatatattgaaactcacggtaaggttgctgccaacactcttccacaaaagtccaatcaattggatcctttatgaagggtttaaaaaactctctttcaatctttttgagaattggtttttgaacgccaagaaagctgaatttatttttcatataagcttccattgctgagactttcgctggatcagcttggttttctaacaatttcaaaagaatttttgtatccatatgattcctccttttttacatcaaaggtccaatcagagaaaaaagataaccgcccagacgatgaaccataggtatttttgataaactttctaaagtgacttcctctgagagagcctgggttttctcaaaatcttcttcaatcttaagcacttccagatttttgtagagataaaccccatcttcaaaattttgatagaggcttcggtagtctgtattaatggttcctaccacagcttgttggctatcagaaacataaaccttagcatggacaaagcctggggtataacggaaaatacggacgccagcatccaagagggctttaaaatagttcgtcgcaatatcaaaggcatactgtttatctggaatccctggcataataatccgaacatctactcctcgtttggccgcgaaagtcatagctctaaccaattcgtcatccaagatcagatacggcgtcatgatgtgaacataatcggtcgatgtattcagtaaatgaagataaacatcctcagccaccttatgataagtcaatggtgaattgccataaggaagaaccaagccctggctctttctttgttgaggtttttcttgtagatagcgctccatatccgctttgtcttctattccggtcactgtccacatggtcaaaaagagagcttttagcgtttgaactgctgaaccatctaatcgaagggccgtatccttccaatgaccaaagcgttctagtttattgacatactcatcagcgatattaacgccaccagtataagcaacttgaccatcaattactgtaatctttcgatggtctcggtaattgtaataggttgatagaataggcttgactggtgagaaggcctgagctttaatgccaaccttgtgcaatcgctcgatataatcgtaggacaaggtagtcatctcattcatcccatcaaacatgacacgaacatccagacctgccttggccttctcctctaaaatggctaaaatctcaccccacatgataccttcgtcaatgatgaaatattccatgaagatataacgctccgcctttttcaaatcctccaacaaggctggaagcatgtcatctccaagtggaaaataggtgacctctgtgtctctgtagataggaaactgtgctggactatgctccaaaaaataagctaatctctgtaattggcgatcactttgggataaataatcagcaacttctggatcggtgcttagatagtcggatgcctgcactgtagcatcctcaagccgcttcttcaagcgtctcacacccaactcagctaacgaaaagtaaagcagagccgtcccaaaaattggaaagagggcaatgataatcacccaggacagtttggaacgagaatccatggaacgattgagcaagtaaaagaaggtaaagacactcaacaagtgttcccataagataatggatgggaaatgctcttgtagactgagatatgaaaagacaagaaaggccaattccagtaagaagaacagaagaatgggaacctttcggttaagtagaattttggcccatctggagggcttttgaggtaacagcctagcactttgttcttgagtcatatagactcctttcatgtaggggagaccatcacaactttcggtctccttcagtaattttattagtatcgttttagcctatgaaaaaggtagggataattagctattgtgatttacaaatgtcgtgatttctactttattttcctaacagggccgtctatggtcttttgcatccagacgatatcatgccatttgttaaacttatagccaatctttgggaaataagcgacttgaacatagccccgcttttcatgcatagctatactagcatcgttcggcactgcgatacaagccagaaagcgcaagtagcctcgtgcttgtaactcttcttctaaggccgtataaagggccgatccaatcccttgtccacgcgcttcttttgctacataaatagataattcagttgtccaatcataggcagcgcgtgcataataggtcgaggcataggcataccccacaactttcccacccacttctgcgaccaaatagggaaattgaatcagcgtttttgtgatgcgactttcaaattcctggacacttggcacatcgagctcaaaggtaatggctgtctctgtcacataaggttggtaaatcgctcggatagtcgctgcatcgctgagtagaacgggtcgaatcatcatggtggcctcctaattagattatacctagtataccgatatgcctcctcactgtcaatgaaagtctagcagcaagcaaaaaatcctggaaatgtatccaggatttccatccttcttaaaccgtttgacttaatcacaacatccggtaaaggaataaatcactcggagccttcaaaaagctcttttgcttggaatttgttgcttttagcacatagttaggtttgactgttttggtgactgtcttagcctgtttaagattcaggccggtttgttttttagacggttgaagggaagctttcactgcgcctgcttgaaggggtttttctttcaccttcaaggcttgtacaactggttttgaagcaggagcagatagtcctgcttgagctgaatgagagagttgactcatggtttgattgtttctgacttcgacatggtttaggatacctccatttggattgaggtgatcggtcacacctgtatcaaatggcgctacaaatacattgtcctcaatggtgacatttttaatatctccatagcgcgtttcaacatcaatcgatccacgatgcttgttgtagatatcgctcttcgtccctgtacgctccaagagattgtggtgaacccgaattccttcttcattcaaatcaaagttatggcccttaaagacagttgtcaagcgaattccggcatccccgatattgtctttaatccgattgtaggcaatttcatggccttttccaccaaagattcccacacctccagcgcgccaaccgagttcaatcgtattgtgcaagaatttattattttctgctactgctgattctgttccatccgcaatacttgaccagctggcaagtccgtcatctccattcccacggatactagaattgcggacaatcgaattcttagtcccttgggcaaagttgactccgtcagctaaattgtttcgcaaacggacattttcaactactagaccatctgtgtatttcatatcgtttttgccagcataatcgccaatccacatgccgacttcaaagtgttcggcccaaatatcgtgaatatgagagttcttccctggcgttccagaaatggccttgtactgggcattttcaccatagcgtgaacgaaggttggaagaaagatagacatcgctgaattcaacatggttgtcttggtgaaggaagtcaaatccaccgccaccagcttggtcactagtaaaatgcagttgggtatgccagataccggcccctgaaatcttcatatcagaagcatcgataccgacttttcgattgagattaaatcgcccagctgggatatagacattctttccagtttgtttagcctcataaatcacatcatagagggcctggctgtcatcggtatcatcatttggcgtagctcctttagaaatgatattgatggcattgtctccctgagcaatcggatccggagcttgctcaaattccacaaagtcaaggccgtaatggacgtcgtctgctttgttttttacgagtgaaaccacatctcctttttgaagttgaatgcctggaagcaggctatgcacttcgtcaaattggaagcgggcacgtgtatcagcctgtgcactatcgtgtacacctttgtcattcaaatactgccagttagatgaggacgaaagatccaattgttgaacactgtgaccattcacctgaacatcgagttgtccacttgcgccatctggtaccgtgtagcgtacggttaaagcattggctggttcattgaccttaaaggaaataccatctcccttttcttttaaagcgacataagtctgatcagaagcttcaatagctgttgagtgactgtcttgagactgctctacctctgcctttccaaggaggttccctttgtctgcctcataacgggtgtaaggcatagatgctccatattggctggtatctacttgagagcttgcgggatcagaggttgtcgcttcttgcccttgtgtttggatttgtgcctgctctccagcttgatcagctgccacagattgtccagtcaaaaaacaagcccccatgatcgcaatcacgatagaaaagactccaagcttagacttgcgaatgccaaaaatgatatctttgtttaaatgactcatcacacatttctccttttattttttacaacgattctatcctaataaaaattatcatgacaaacaaggtgaattgtgtgaatattctgtatcaatttgttgcagaaatgttaacctttttatgtagtaataaaagtgagtaagaaaaagaggctgagaatgctttctcaaacctctttcgatgacacgcacttattccgcttttttatttgaaaattggctattgtagagctcatagtagaatcctttatctgctaacaaggattggtgatttccttgctcgatgatttgtccatctttgaggacaaggattttatctgcttcttgaatggtggacaagcggtgagcaatgacaaagctagtccggcctttcatcaaattcttcatcgctttttgaatcaagagctctaaacgcgtatcgacagaagacgtcgcttcatccaaaatcaagattttaggatcggccaggagcgcacgcgcaatggttaggagttgcttttgccctagagaaatattgctagactcctggttcatttccatgttgtaaccaccgggaagcgtccggataaagtgatcgacattggctgcctttgcagcttccacaatttcctcatccgttgcctcgagattaccaaagcgaaggttttctttgatggttccttcatataaccatgcatcctgaagcaccattccgaattgtttgcggtaatcttggcgagatagatgacgaatatcatgaccatccactgtaatcgatcctgcagtcacatcgtaaaagcgcatcagcaaattaatcagggttgttttccctgctccagtcggtccgacaatggccaccatttcacctggcttgacttctaggttgaaatcacgaatcaagggtttgtccgctacatattggaaatcaacgtttttaaagctgacttgccctgtcaaatctccagaaaggggttctgtcacatctgctacttcatctggttcatccatgacttggaaaatccgatctagagacgacttagcactttgtagctgtcctgccaattgggtcaagttttgaattggttggttgatctgccaaacatattgaacgaaggcctgcatattcccgacagtcaaacgacctgctatcacttgcaagccaccaaacaaagcgataatgagataagtcaaatctgaaatcccatttaaaatcggcatcattaagccggaaatgaaattagccttgaatcctaccttttgaaggtgatgggtaatatcatgaaactcttcctgagaagatttttcccggacgtagagcttaaggacattaaaacctgttaaattttcttgcacaaagccgttcattgcccccaaaacatctgcctgctctttaaagtaaggttgagattttttcatgataaatcgagcactgaaataagtgatcggaatggacaagatgaccactagccccagctggatgtttaagtataagaccatgctgatgacaaagagcaaggtaaagatagcattaacgatttgtaagaaggactgttgcaaggcattcgagacagtttcgacatcgctagtaaaacgtcctagcaaatctccgaactgatgccggtcaaaataggaaaccggaatgtggttgattttatgagacaaatcatttcgcatgtcctgaacggtcttttgaacagcattggtcataaaatagttggaataataagatcccaactcatagaggaccccacggaatagatagagcgtcataatgatcgcgatataggaggtgttaagaccagctcccgcaaggccttttgccatatccatgagattttttgtcaactcagtaatggcaagtcccaaaacaaagggttcgacaacactcatgacgacactcaggatttttaagaaaatggacaagcaaacttccaagcgataggctctcaagtaagtccatagtctagaaaaactgttttgttcttgtttcatctgcttctcctttctattcctctgttaatgacggactgtcgagctgcgaattggcaatttcacgatagatctcattgctttccatcaattcatcgtgggttcctcgaccaacgatttccccttggtccaagacaataatttgatccgcatccataatggttcccacgcgttgtgctacgatcaagacggtcgcatctcctgtaacttctttgagacgtttccgcaaagtggcatccgtcttgtagtctaaggcagagaaggaatcatcaaaaataaagacatctggatctttgacaacagcacgagcgatggacaagcgttgtttttgaccacccgaaaggttgctaccaccttctgccaaatgcgtatcaaagcgttcctcacggctgtcgataaattccttggcttgggaaatttcagctgcttgttctagctcttgtacagaggcgtcttctttcccataacgaaggttctcagcaatggttcccgtaaagagcaaggccttttgtggaataaaaccaatcttttggcgaagggctttcagattgtagtcacggacatccacaccatccaccaaaatcttcccaagtgtgacatcatagaatcgaggaatcaactgcacaagtgaagatttcccagaacctgtcgatccgataaaggcgatcgtttcgccgggtttggcctgaaaggaaatgttgtgaagaactggactctccgtctcacctggataagcaaaggtgacattgtcaaattccaaaaagccacgagatgctgtttctgttacaccattctcatttggatcgatcgaaatgggcatgtccatgatttcctcgagacgccggctagaaaccgcagtccgaggatacatggtaaagagattggctaaaaagaggaaagataagagcgcgtggaagctatactcaataaaggcaaccagatccccaattttcaaactaccgtcatgaagaggatccaaagcaaaccagacaatcgccacaatcatagcaatgatgatctgcacaaataggggttctgtcaaaccagttagtttaaacaatttattcgagttctctgcgtagacttcattttcagccgcaaatttatcctcttggaattcttcgcgggcaaaggcacgaatcacacgaagtcctgtcaaattttcacgcgcaaactgattaagatggtcgagggtcttttgttgcttctcagaaagtggacgtgtcttaactgctacataccagacgacgacagcaagaaatggtacagataccgctacaatccacgctaaagaaggactggttgtcagaatcaagagaacactggaaaccatcatcaagggtgtgatgacccccatcttcaacatagaatccgcaaactgcatcaaaacaaaggcatccgaagtcaaacgagtgaccaatgacgataccccaatttgctcatactcgcgatgcgagtactcctgtaacttagcatagaggtcattgcgcatatcgcggaccatggtggtcgttagttgaccaaccgcgtaagacaagataatccgtcccacaatcccaagcaaaataatcgcaaacatgacccagccccagaaatacaatcgatccacatcacgcgggttaatcccctcatcaatcatgcgagctagaatcgttggcaagcccaaattgacaataacaaacaggaccgctgaaaatagattcagggctagccacttgggatactttttcaagtaagaccaaatatatagcatagatgattctccttttccataaataataaccttgatcacacagaaaagagggagcgagacgaaatcattttcaaagaaaatcattcctgccccagtcccatctgtagtctcattcattataccaaactagtcataaaagtaaagcaaaagagagtgggacagaaatcggtaattcgttagaattcgatttcgtcgtcccacctccgcacagttgagtagggctgtaaaagctgatgaaatcagcgtagtagagcccactcaaccactgcgtcttgctcgacaatccaaaaataattgagaggctaagacttttgtcccagcctctcagtcgctttattttgtgcgtttgagtttagcatttttaagaatcataagatccccttggttgctattacttaacttagaaagatcaaatgtcaaatagtcaccatcaaccttatatgtaatcttttctccactaccatcatttgacgagattgttttctctttttgattgattttgacatcataagatcgctcattcttttgaccagcgacttcacccgcgatgctgagggttcctttagaatctttgatcttaatagaaacttcaaaattaataacgtctccaatagactctaattgactacctgataagccttgatcttcaagaattttcttgagttctgtttttgatggtttgtagacataagtcccattatcacttttggcaccacatgccaccaagaggacggctgcaaaaactgcaacgaaagctaaaagaatacgtttaatatttttcataatcaatctcctaatgtattttataatcagattttaccactattttcataccgattcaagatattttaaagaagaaaaagagcagatcccctctgctcttctcttgtattattttgtacgtttgaatttagcgtttttgaacatttccaaagcagcttcatgacctgaactcttttcaccagataaatcaaaagtgaacacatcgcctgaaactttgtatttaaccttttcaccttcacctgttttagattgaagagttttcttttgttggtcaactttcatatcaaatgattggtcagtcttttgtcccatcatttcacctttaattttaaggctacctgttttatctttaatggtcactgaaacttccaatttaacattgtcgatcaatgcatctacacttgaacttggagcaccttgttcttcaaggatttccttcacttcagtttttgatggtttgtagacataagtcccgttatcacttttggcaccacatgccaccaagaggactgctgcaaaaactgcaacgaaagctaaaagaatacgtttaaagtttttcataacttctcctttttagttagattaaacctattatatcaacaattcaggcacacggcaatgaaagtttataaatgtcatattcttgtaatatttcttgtatcaacaaagaaatagaataaggcggaatttaaatcccgccatgattgcttatttaacttttttgaacttagcaattttcatgtagttattaaacatgtctgtgtcacccatcaaagaattcttcacatccttaatcgttaacacatttcctgaaacttgataagtaatttccgctttcccatactcattttctgagacaagagttttagctttttggtctacttccaaatcaatcacttgatttacattttgaccacctgcattggtgtctactttcatctcacctttcttatcattgattgtaatcgaaatagtgaatgagtaattatcacctatcaaagattgaaattcacttggcataatatctttgatctcatccttagtaggctcaaacacgtaagtcccattatcgcttttagcgccacaagctaccaaaaggacggctgcaaagacagctacaacagctaacaaaaaacgtttaaaatttttcatcatcttctcctttatgatatgatttatagccattatagcaacaaattagcaacatctcaagggaatatagcaaatgtaaaatcattgtaacatcattaaaactgcactatttagtaggtttagagaaaataaagagagctacacatgttagctttataaaagccctctattcacattctatcatcattattttcaacgacaaaaaaaccgaggtctaaacctcggttttcattttgattggaaactctattatttaagagtaactgaagctccagcttcttccaatttacctttgatttcttcagcttcagcagctgcaacaccttctttgatgacaccaggtgcaccatcaacaagttctttagcttctttaagaccaagaccagtgatttcacgtacaactttgataacgccgactttcttgtcgcctgcagatgtcaattcgatatcgaatgaatctttagcagcacctgcgtcagcagcaccagctgcagcaacagctacaggagcagctgcagttacaccaaattcttcttcgatagcttttacaaggtcgttcaattcaaggattgaagcttctttaatttcagcaataatgttttcaatgttcaatgccattgttatttcctccaaataagttttaattttatatttttattttttgtagctaggctacgctgcgtagcttaagattaagctgcgtcttctttgttgtctgcaaccgctttgactgcaagagcaacgttgcgcactggcgcttgaagtacagaaaggagcatagaaagaagtccttcgcggtttggaagagttgcaagtgcaagaatctcttctttagatgcgacagcgccttcgattgcaccacctttgatttcaagtgcttcagcgtcttttgcaaaatcgttcaagattttcgcaggtgcgataacatcttcgttagaaaatgctactgcagaaggtccaacgaatacagatgcaagatcttcaagaccagctttttcagctgcacgacgcaagattgagtttttgataactttaaactcaacttcgcttccgcgaaggttgcgacggagaactgtatcttgctcaactgtcaaaccgcgagaatctacaacgacgattgatgcagcagctttcattttttcagctaccacgtcaacaagttccgcttttttagcaataattgcttcactcattagtgtgttcacctccgtaattattttgcttggggaatttttccaaaagaaaaacgcgcccaaacctagacacgaaagtacaatacgcttcttttaattgatacgttttgtcctcggtaggatctttatgagtcgagctcccctactgtcttaggcagttttttcaaaccgtagattagtttatcacatataaaaaaagaatgcaagtacttttgcaaactttttttatattttttaatcgttgtagagactcttgatattattcaaccaagcataggctagtcccattagaactcctcctcctacccagttggcaaagaaggtgacaccatagtgacgtaaaatatttaaaaattcaaaatgcggcaattggctagaaactgaattaaagctcaataatgagaaggaagcaaagtttgcagctaagtgttcattggtcataaagacaaacatataaatagcagagagagctaaaagtacctttgccgtttcgtctttaaagtataaataagaaagaatagcaatatttacaaagatattggcaatgactccttcaaagaaaaccacttgattgctacgttgtagtttattttctgccaccgtagccaggaatccttttggatcgatatgagcaaaggctgttgtttgattgaacagaaaagcgacgattaaagcaccaattaaattaaaaaaggtacaataaagaagaatttccagtgctttcttccaattaattttctttagataggtccccgccgtcaaatacatcatatttgaggtggttaattccgcatttaagaataagaggtataccaaaccccaggcaaagatgaatggaaataggaaacgacccgttccaggtacaaagctatttaataagtcagcagcaactgctccgaccgccgtacttaaagtaagaaatcctcctgcaaaaatagagcgaactgcatagcgagtcttagatttctgataaaggtcctctttcttattacacgccgctcccactttttgaataaaattagattcagacatactattctccttatataatgtttgtgaataaaatcattatatcatagacaaaaaagtttgaaaaggttttcaggaagaattcttaaattcacaatatatacgttttaaatcatacacaaagaaataataaaaaaaacaggcatttgcctgcttttcttttttaatagtttaaacggtttgcccaagcgatatccaaattcaagatttcttgtgaagtgaactgttgacgatatggattgtataccgatccagtgatgccaccctgaacatttggtgaatcatattgagtcaaattataggtttcaatgatattattgagctttgcgtagtagctagtatctgtcgcataaacacctgtcaaagccgctgttgcatcttgataacttgatgtgttactcttccaagcacctgcaaaatgtccttgtttcaaaactgctacatagtcttgcaatgattcatagtaagaagggtatgaacggaaagcatcattaatcgtatacgcatttccagcaccatcatcttcccaagtttgcatcactgcagattgtccagcataacttcctttaatcccaaaaagattgtaatgtggataagaagccaaaccagactgtcctgatccactttccaagatcgcttgtgcgatcataacggaagcataaagatcattctcttgaccaagctgacgagctgactcaccaatttgtgagatgaaagcttcagttgggtccgagtatgcttggtaagttccatcattagcaccaactgatgttacgtgctcgctcatagcagcagcaaatgtccccaccgctaatacagaaacgaacaaaccaaataatttcgttttattccgtattttctttttcataatacaatttatctccaattaattttttatcatcttttatctttatagagattataccatataaatagaagaaaacaaagccacttatattacacttctattacaattgcgagataaatccaaaacaaaaatgacattttcatgtcatttcaatttatttcgtaaaacgcattttccaaaatagcatcccatgactcctctagtccttccttggttaccgaagaaaagacaatgaaagtatctgctggatcaaaatccagttttttcttaataatggattcatgtttgttccattttccacgtggaatcttatctgccttggttgctactaagatcacagggatttcataatattttaagaattcatacatctgaacatcatctgcagaaggttcatgacgaaaatcgactaggctaacgactgcttttaagttctcacgactggtgaggtattcttcaatcatccgcccccacttctcgcgttcttttttagagacacgtgcatagccataaccaggtacgtctaccaaacggagtttatcatcgatattgaagaaatttagcaattgggtttttcctggtttcccagatgttctggccaggttctttcgatttaagagagtattaataaaagaagacttgccgacatttgatcgaccggcaagtgcaacttctggaatctcatcttgaggataatgactcttatttgcagcgcttaagaggatatccgcattatgtgtgttaatttccatattttatctttctaggctgtttcaagaattggtttttctgttccgtcaacagcttcttttgtgattcgaacaagtttgacatcttcttgacttggaatttcaaacatgacatccatcatggtttcttcgataatcgaacgaagtccacgagctcctgtttttctttcgatggctttattcgcaatctcttgaagagcttcgtcatcaaattccaattcaacattatcataagagagtaaggtttggtattgttttaccagagcattgcgtggctctttcaagatacggacaagatcgtcaactgtcaattgctcaagagcagcaaagactggaagacgtccgatcaattctgggataatcccaaatttttgaatatcttccgcaacgatttcttgcatgtaagagctggattcatcaatagctttattgttcttaccgaaaccgatgattttttcaccaagacgttgcttaacaatttcttcgatcccatcaaaagccccacctacgataaagaggatgttcttggtgtccacttggatcatctcttgttgagggtgtttacgtcccccttgaggtggtacactagcgacagttccttcgatgatcttcaagagagcttgttgcaccccttcaccagaaacgtcacgtgtgatcgagacgttttcacttttcttagcgatcttatcaatttcatcgacatagatgatgccacgttctgcacgctcaatattgaaatccgctgcctgaagaagttttaagagaatattttcaacgtcttcacccacataaccggcttcagttaaagctgttgcatctgcaatagcaaatggaacattcaggctacgagccaagatttgggccaagaaagtctttcctgaaccagtaggtccaatcatgaggatgtttgatttttgcaattcaacatccgtctcatcttcgcgtgtatcgtggaagttgatgcgtttgtagtggttgtataccgctactgcaagggcacgtttagcccgatcttgaccgatgacatagtggttcaagatattgagcaattcgattggttttggaacttcactaaggtcagctaggacttcttcagcaagctcctcccggatgatttcttgagctaactctacacattcattacagataaacgcattgtttcctgcaatgattttttggacttcatcttggctctttccgcaaaatgagcaataaaccatcatatcattattttgattcgttggcatgtatttcctctttctgtcattttctgtttctatttagtttaaaataaggtcatgtaaaaggcgtgaatagaatttacaagattggtaaaagcatttagtaagaataaaatagcgaggccaaaacgttttttacgaaaggtttgtaaggcgcaaatcaaacagatgacacataggacagctgtaaaaaaaccaaagacacttcgctccattagtctaaatcctttctcttataatagttgaccgtaaaatcatatgggttcttctcatctttcggatgatggacttgacggactttttcatagtggctctcttcaaattttggtgccaatgtatcgccatcaattgttgtatgaatcatggtctggatcaactcttctaactgatcagagaaaagccttaaaatctgactccccccaataatgtaaagattcttctcttgtttctgataccactctaagacttcttctgtgctatgcatgacgagtacagcatcattttcagaatcataagcctgatcttgcgttaagataatgctagtccgacctggtagaacccgttttttcataccatcaaaggtcactcttcccatgagaattgcttgtcccatggttgtttctttgaaatgctgaagctctgctggcagatgccaaggcataacttggtcttttccaataatgccattttcagtttgagcccagataccaataatctttttcattctctcatcctttacactgatacttctattttatcaaattttcttataaaagactgatttcaactatctagtttggaggatatttttttcaaatgcaaacagaaaaaaccgcgagattttcgcggtttttcttagccacaagttagcttagtcttcttttttgcgttttgcaaatccgaataatgagagacctgctaaagcactaaagattgcaagaccagcagtagaagattcttttgttcctgtatttggaagttgtgcagtaggattttgtggatcaatatacttcacttcttctttcgtttctggaacgacaggaatcgttggttcttctggttttggttgtggagtaggttgtggttgcggtgttggttgcggttgtggagtaggctgtggctgtggctctggtatcggagttggatccggcattggagttggtgtcggagttggatccggcattggagttggtgtcacagtcttcttgtagatatgttgagtgtttccatctttatctacaacagtcttcacgaagtcataaccagggatatctttcttcggttgttccccatcttctgtagggttacctgggataggaacaccattttcatctacgtatgaagttgtaactttttcatagacgtgttcagtatcaccattaggcaatttcttcgtttccacaaagcggtaacctggaatttcagcttttggctcttctccattaactgtagggtatcctgggatttccttaccttctttatcaacaaatttagtaattggaagaacagttggtgtgtaagttgcagaagcttttgttccgttcacatcttcacgaaccactgtcactgctggtgcagtaccagtaaattcaggttctggagtgaaggttactgttccgtctgctgctactgtgtaagtaccaacacctggaattgtcttcgtagttgaaccatcttcaaaggttgctggaacttcgtcattcattggtacacggctatcaccttctgtgaagcttggtttacctgtttgagtagcacccttcttaccaattgaagtaactggttcacctgttggagcaactggtgttacagttggtgtgtaagtagctgtaattggtgtaccgttcttatcaacacgtttcactgttacgcctgtaccagttcctgtgaatgatttctctggtacgaaggttactgttccatctggagcaactgtgtaagttccttcacctggaattgtcttcgtagttgatccatcttcaaaggttgctggaacttcatcatccattggcacacttgggttacctggtgtgaagcttggtttaccagattgtgtttgaccttggatgtctgtagaagttgcaggtttagctgttggagtcacaggagttacagttggtgtataggtcgcagaagcttttgttccgttcttatcttcacgaaccactgttacagctggtgcagttcctacaaatgatttttctggtacgaaggtaactgttccgtctgctgctactgtgtacgtaccaacaccgtcgacagtcttcgtagttgaaccatcatcgaaggttgctggaacatcatcgttcattggtacacggctatcgccttcagtgaagcttggtttacctgtttgagtggcaccttgcacatcagtagatactgctggagttgcagttggagttactggtgttacagttggtgtgtaagttgcagaagcttttgttccgttcttatcttcacgaacaactgttacagctggtgcagttcctacaaatgatttttctggtacgaaggtaactgttccgtctgctgctactgtgtacgtaccaacaccgtcgacagtcttcgtagttgaaccatcatcgaaggttgctggaacatcatcgttcattggtacacggctatcgccttcagtgaagcttggtttacctgtttgagtggcaccttggatgtctgtagatgttgcaggatcagcagttggtgtaacaggtgttacagttggtgtgtatgttgcagtaactggagtaccgttcttatcaacacgtttcacggttacgcctgtacctgttcctgtgaatgatttttctggtacgaaggttactgttccatctggagcaactgtgtaagttccttctcctggaatggtcttcgtagttgaaccatcttcaaaggttgctggcacatcatcatccattgggattgcagggttaccaggtgtgaagcttggggtacctgtttgagtttgaccttggatgtctgtagatgttgcaggatcagcagttggtacaacaggagtgatcttaggtgtgtaagttgtctcagcaaccgttccgttcgtatctttaccttgaaccttaactggaacaacatcacctgagtaagatttatccgttggtgtgaaggttacaacacctgtttctttatcaacagtgaaggtaccgatcacatcacctgctggtgatttcgcatcaactgatgctgctggctgaccattttcgtcaaggagagtaatggtatccttgtcgattggtgcaactgggtcaccttcagtgaaggttacagttccagtttgaaccacaccttgaggggcttctgattcagctggagttgctgttggagttactggtgtcacagttggtgtgtacttagcagtaactggagtaccgttcttatcgacacgtttaaccgttacgcctgaaccttctcctgtgaatgatttttctggtacaaaggttacggttccgtctggagcaacagtgtaagttccttcacctggaatggtcttcgtagttgagccatcttcaaatgttgcaggtgtatcatcatccattggaacatttggattaccaggtgtgaagcttggggtacctgtttgcgtttgaccttgtttgtcattagatgttgtatcttctgcagttggtgtaacaggagttacggttggtgtataagttgcagaagcttttgttccgttcatatcttcacggacaactgtcacggctggtgcttcaccagtgaatgatttttcagggacaaaagttacagttccgtctgctgctactgtgtaagtaccaacgccgtcaactgtcttagtagttgagccatcgtcaaatgtagctggaacatcatcgttcattggcacacggctatcgccttcagtgaatacaggtttaccagtttgagtcgcaccttggatatctgtagatgttgctggctcagctgttggtgttactggtgtcacagttggtgtgtacttcgctgtgatttcagtaccgttcttatccacgcgtttcactgttacacctgaagcagttccagtgaatgatttttctgggacgaaggttacggttccatctggagaaacagtgtaagttccttcgccatctactgtcttagtggttgaaccatcttcgaaggtagcaggtgtatcttcgtcgattggaacatttggattaccttctgtgaaggttggtttacctgtttgagtggcaccttggatatcagtcgatgttgcatcttcggaagttggaacaactggagtaatcttcggtgtgtatgttgtttcaactgtagttccatttgcatcagctgcttgaaccttaaccggaacaacatcacctgagtaagatttatccgttggtgtgaaggtcacaacaccagtttctttatcaactgtgaaggtaccgatcacatcacctgctggtgatttcgcttctactgatgctgcaggttgaccattttcatcaagaagagtaatggtatccttgtcgattggtgcaactgggtcaccttcagtaaaggttacagttccagtttgaaccaaaccttgaggtccagtagattcagctggtgttgcagttggagttactggagttacagttggtgtgtaagctgcagaggctttggttccattcttatcttcacgaacaaccgttacggctggtgctttacctgtgaatgatttctcaggaacaaaggttactgttccgtctgcggctactgtgtaggtaccaacgccttctactgtcttagttgttgagccatcgtcgaaagtagctggaacgtcatcgttcattggcacacggctgtcgccttcagtaaatacaggcttacctgtttgggtttgaccttgcttacctgttgtttcaactggtgttgcagttggtgtgactggagttacagttggtgtgtaggttgcagaagccttagtgccattcttatcttcacggacaactgtcacggctggtgcttcaccagtgaatgatttttcagggacaaaagttacagttccgtctgctgctactgtgtaagtaccaacgccgtcaactgtcttagttgttgagccatcgtcaaatgtggctggaacatcatcgttgatttcaacagttttctcaacgccatcaactgttactgttccacccttgaattcaggtttaccagtttgtgtagcaccttgaatatcagttgtttcagctggtgtagctgttggtgttactggcaatactgttggtgtgtatgttgcagaagctttggttccgttcttatcttcgcggacaacggtcacggctggtgcagttccgacaaatgatttttctggtacaaatgtaacagtaccgtctgctgctactgtgtaagtaccaacaccgtctacggtcttagttgttgacccatcgtcaaatgttgctggaacatcttcgttgatttcaacagtcttttcaacgccatcaaccgttacagttccacccttgaattcaggcttacctgtttgagtggcaccttgaatatcttttgtttcagctggttttgctgttggggttactggaacgatttctggtgtgtaagttgtatccaccttgataccgtttgaactttcagcttgaaccttagctggtgttactttaccagtgtatgatttgtctgttggtgtgaaggttacttgacctgttgctggatcaatagagaaagtaccaatttcagttgtaccatcttcagcaaaggctggtgtgcttgaaacttcgttaccatctttatctagcaatgagtagctattgtctttaatggtaatagctttatcttcaccatttacttgaacagtagttcctgcaaaggttggtgtaccagtttgagttgcaccttgaacatctttagaagttgcaggatttgcagttggaactgctggcacaacagttggtgtgtaggtcgcatctgaagtaatagttgcagtcttaccattagcatttgtaatagtagcagttgcctgaacagttactccttttgcagtaccaacaaagtctttttcaggtgtgaaggtcaccgctcctgtagtaggatcgattgtatagctaccttcacctgctactgttacagttgtttcatcagtcggttgaccagttgctggatccaccaatttcttgcttgtgatttcagcagtcttatcgttactcaaatcaaaggttggtgtttgggtttgaggaacattttgaatatccgcagaaaccttgtctgtaggagtcactgtgattggagtaaccgttggtgtgtacttagctgtcgctgtcttaaggtattcatcacgaacggtaccgtctttatctcttccgacaggagctgtcactgatacggtaacaccttgagctgtacctgtgaatcctggttctggaacaaaggttactttaccagtagcatcgtcaatgctgtatgttccttcacctgctactgttacagaggttgcattggttacttgaccagtcgctgggtccaccaatttagcagggtattccaagcttggagtgacagagatcttttcgccattagcattcgttgtagttgtgttaaaagtaggtgtaccagtttgagtcgcaccttggacatctgatgaagtcttatctaccccttcaatttccgttggtgtaactgttgggatgtatagaccgtccatggtattgatggcagtatcgacattggcttcatcggctgggaattttgttgaccaacccgtatcgtagccattgctgtctgtacgacggatagagataccgtcagctgttccaaggaagtgatcttcgggaatgaactcaacatccacagaagttccgtttgaagtgatcttgtacttcccttgaccagctacagcatagtagccatctgcaccaggtgttacgacttgccccgtacggttatctatcatttgtggagctactgtttcatcaatttttgctgactcagttaggctatagccttgcaaacctcgagcagtaaaggctacggttgctgtttgttttgcaccttgagggccagttgtttctttaaattccccttttggtgggtgagtgatttgagtcttaaagtcttcaacctcaccagagaaagccatccccgttgggctttcaatttgatcagcatccttagcaatccggacacgaacacctaattcattgacactaggatcaatataggttttactctttgtaaatcttaacgtagccgttccatcttgggtaatggttgttaaatcagaccgttcatcttcatcgaaggttccgttttggttgaaatctacccaaccatagatgttagcttttgctgctccatccgtatgagcttccactaaaatggtgtaattacctggacgtgtccggtccatcttgatcagctcattggttttccctttgagatcatttggaagtaattggtcgatgccttcatccgcagtggtcgccttgtcatcacccgtccaatcaagcgtattgttttcatccatatcagggcttaagtgacctagataaggttggtttactttcttacctgttacaccatctacagttgcaatcgaatgaatcgccttcccgtaagatgctggcgcatctccttcatcaagtgggaagaatccaagcatggctgattgtttaccacttgaagcaatgtaaagaccaacttcagaagctccttttgtcataacaaggggaacggcagaaggacctgcagaaatatttggcccgaagacccctgttccgaggcctccagttgttaaatcagcacttccaaagtacttccaagcaaccgcttttttatctggtcccacttcatttgcacgtttaagtaagttaaggttcgtcgaatagtaattcgtaccttctatattaaaggaaggatttgggccaaataaattgtctgtatcttgtggaataaaagttttagtagatgttcttccatatttataccactccccaatttgtttccaaccttctccgtttgtggtgaaaataaccgattcaccagggttagcggactcaccatctgccatgactacagcaggttttacggttttgccacggaaagtagcagaaatttcaaactgaacaccaatatttccaccgtcaaactcggaactgatggttgtttttttagtgccagtatcgatgccttcaccttttatttctgtccaacggttttgagcttcggcaataattttagcttcttcaccttttccaaatgcattgttagttccaggattagtagttgttcctatatatccgttcttagcatttgggtcataggtcgctttttctgcttctgttgctcctcgttcttcaagacgttttttataaagttctgtcgcttggaagggttttaaggatttaaccttgatcttgaccacatagccaggcatgatttccttggtgtaggtagagcctacttgaagggccagattcccgcttgatgttgtcgtcgttcctgtccagttagctacatctccaaaatccaaccaagagatttggctagccaagtctgtagctttgatatttgttgtaaagccaggtttttcaacttttggagttgatgtggcatcttggacatcatctccgatgaggtttggatcgtttggatccccaattgaacgacgactacgacgtttaccagaagtttgtgctgtctcttcagtggctagtgtattgtttgttggtagaccttgtccagctgaaagagttggtgtttcttttttatctgcacttgttgaagttacttctgccgccttgtttgcaggtttagcaacttctaagcttggtgtttctgaacctgttgatgttgctggtgcagtcgaggcagcagatgctgctgtgctcgcgcttgaagcggcacttgtagacgctacggcagttgatgtagctggtgcagcagtgacggctgggcttgcatcataagtcgatgtagctggtgcagttgacgtagctgaagttgctgtagctgttgaagttgcgggcgcttctgacgctgttgcaactgctgctacactttcacttgtcgtatctgtcttttcttctgcggctgcacttgcggctgtcccaaccatgacaagcgttcccaaaagtactgagcaaacccccacattcagtttacgaattgagaatctgctaatacgatcattaaataagtctttccccatctaatggacctccatatttatctataaattaacattctttttaaaattgtttagtttttacaaaccttatctattttaacaaaaaccgaacgattttcaaaacattttgactcaaaaatgagtaaaaatttttagctaaaattgttttaattctaaaaggattttaccaattgatcaaggcatcaaaaaaccttgatttattactaaatggcaagatcgaacttcaattgtggcctcactggatcataatcgaccagttcaaaatcttctggtttgatgtcaaagaaattggttccatctggtacattcaaaaccaagtgtggctgacaatctgaaggctcccgacgaagtaactcttcagcctgttcaaattgattatcataaatatgaaggttattaatgaagtaaaagaactttccaaccttccagccaaagtgcttggcaatcatcatctgaagagctacatattgcatggcattgatatggtgggctaccaacatatcatttgaacgctgggtcagggtcgcatctagataaatctcttcatcaacccgacgcacgtcaaacatggtttgaaatgcacacggcaagagtccgtcggtctcctcaaaggcatcataatcccagagcgatatgatgtttcggcgattccaaggattggcctctaattgtttgaggattttattggtaaggtcatgctttttgaccacagcaccatagcgttgaccaatagtacgactatcccctacttcccagtcattccagtagtggacattgtatttatcttctaacagatccaagctattcgactgatcctggtagatccagagcatttctttgatagctgatttaatcgcgatgggacgaagggtcgtgatagggaactcaccttttgcgaggtcgaattccataaaggctcccgtgatgtacttggagttggccgttctaccatccttgtacttagggcgcgcctgctctgaccaaaccccttcttccatgatttttcgaatgttttctttaaaaattgtatctgcttttgtcatatactctccttgaatccagttttgtcttcattatatcacaggagacagaaaaaaaggagatcccagcacgtgccagatctccatttcatcttattgtaatacaagggatgcagcaccgatcacaccggcgtcatttcccaaagtagcaagtgctaattgagtagattcacgtacttgtgggaatgagttttcttcaaagaccttgcgcacgccatccaagaggaagtctccagcagcagataccccaccaccgataacgatcttagacgggttcaaggttgaaccaatattggctgcagcaagtccaaggtagcgtgagaagttcttataaacgatcaaagcaagagcgtcaccctcttttgctagatcaaagaccgttttagctgtcacttcttcaccattgtcgatcaagactttcaattgagagtccccttcgtactcatctgcataacgacgagtcaagttgacgatcccagttgctgaggcaaccgtttcaagacagccttttttaccacaggtacattggattggatcatcaaagtcaaccgtgatgtgaccaagttccccagcagctccacgcacaccgtgcaagagacgaccttcagcgacgataccaccgccaacacctgtaccaagtgtcatgaagacaacatctggttggttttcaccagcccctttccaacgttcacccaaagcagcaacgttggcatcgttatcaatgaagaatggaatatgaagggcactttcgattttttctttaactggttgaagggtcttccagttcaagttgtaggcaccgataactgtacctttttcacggtcaacgacaccaggtgaacccattccaattccttggaactcagaagcatcaagctcaagcatcttcaaacgatgcgcgatggattcgatcatatcatctacgatatggctaccttcatccaagatatttgttttaatagaccatttttcttgaacttccccatccaaagtaaggatggcaaacttaattgaagttcccccaaggtcaataccaataatttttttagacatctgtaactcctttcaaacttgtaaacacttacagatctattatatcagactttttatcaaacgcaaaggtttgcacgtaacttttcttaactttttaacaagagactaaaggattgaaatcctaaaatgaggaaaatcaagccaataatatttaatagaaagacgctaatcgaaagcggactaacaattaagaataaaccgatgaagagctgtagcaaggcaaagaaaatataacgcttggacagttcctcaaccttcctcgagtagaaattggcttttcggaagttcaaaatcgaacggtagatgagccaaattcctaaagtgactggaaagacaatcggcaaagtcttgtagccataaagcagtaagtagaccgcaaaaaccaaggcgaccatactgtgaaagagctgttgctgctgaatgataccagcctgacgcaatcggtaatagcgtgaaaaacgcgaaagggagattaaaaagaaaccacaggaaatcaaccagctaaatgagccgatgtgctcaatcggattgataaacaagacgataccgataatagtaaaaatagtggctgaaatcccaagggatatccggttcaattgattcatagggcctccttattcatctaattcgctcagatattcatagcgatcgtacttctcaagcaatcgctcattttcctgatccaattctttttgaagggctgacaatttgccaaagtcagagccgttttcattcatctccacttcaatctctgcaattcgattttcaatcgcttcgatatctgcctcaatacttgcccactcttgcttctccatgtagctcatgcgcttcttctcttcttttggcttgacaggtttctctttttcaatcttttgactagccgttacctgggctgcttcaaaggctttttcatctaaataatccgtataattgccaaagaactcacgaatgcccccattttcaaaagcaaggatcttgcttgcgaccttgtctaggaaataacggtcgtgactaacggtaataacgggaccaccaaagttttgaaggaagttttccaaaaccgtcaaggtagcaatatccaagtcattggtcggttcatcgaggagaagtacattgggtttttcaatcaagagtttcaagagaaagaggcgcttcttctcaccgccggagagtttctcgatcaaggttccatgcatagagcgtgggaagagaaattgctccaagagatctgcgatcgaagttgttccgacagtcgtcttgacttcctccgcaacctcttgtaagaaattaatcacgcgctcgctctcatctaagccatcgatctgttgagagaaataagccaccctcacggtttccccaatgatcacttgccctgactgaggctggagtcgctcagcgatcagattaagtagggtcgatttaccgacaccattatccccgacgatcccgatgcggtccttattttgcactaagaggttaaagtcttgtaaaatcggcttattttcaaaagcaaaactcacattcttaaactcgatgactttctttccgatccggctggtctcaaagttcatctctagatccgtctgattgctttgcccagacaagtcttgcttaagatcatggaaacgattgatccgagcctgttgcttggtcgcacgcgcctggggttgcctccgcatccaggttaactcctgcttatagagttgctgcttcttatgaagaagggctgcatcacgctcatcttgctcagcctttaagcggacataatcctggtaattgccttgatactcaatcaaactagcccgatccagctcaaagatccgcgtcgagatattatccaagaaatagcgatcgtgggtaatgaagagcacggttttcttagaattcttcaagaaattggtcaaccattcaatagtatcaatatctaggtggttggtcggctcatctagtaagagcaagtcgtggtgagacagcaaaacctgggccagttgaacccggcgacgcaagcctccagatagatctccaacttttgcatttaagtctttaatcccaagttttgaaaggactgtcttgacctgactttcgatttcccaagcattgagtgaatccatctccgctataaccttttccagacgtgcttggttctcttctcggtaatccgccatcaagaattcataatcacgaatcaactgcatttcacgcaaatcactagataacaccgtatccaaaacagtcttttgatcatcaaagtctggctcttgcgtcaagtaaccaatcgtataatcacacttggcagaaaaaggactcacatctccatcaaagccagagcgaccagacaacacatctaacagcgtggtttttccagtcccattgaccccgatcagtccgatccgatccaagtcatgaatgataaaggaaatctcacgaaagacggtcttatctccgacagatttggttaatttatcgacaataaaatcgctcatttttcctccttttttgcttgctggatataggcaatgatggcttctttttcattggccagttccccatcgacaatggcatattcgatctttgtcaaaatctctcccaaggctggaccaggttgaaagccatattctttgatcagcatgccaccattgaccaccacttcgtgcttatcatgaatggtcaagctatcatagacacgctcgatggccagataatctacactcaaggcatacgcttcccggagctcttccgccactagcaacaaacgcttctcatacttgtagcaagcacgcttgtctagacttcctttttctcggagcttaagaatctctacgatctgctccaccgtcttggcaaactctctagaggtcttccattttttaaagaattttggaatatcttgaatctctagtgctaagaccagagcagcccaggcttgctcagaagttgaaaaggtatattccaactctatgtcaaacaaacgctcgattgcttctttgcgatccttcatctctggcagatagtgataagcaccacttgcaagcagggcctccaagccctgtctccagaatggagaaagcaagagcttatcaaactcgatgaaggtgcgctctacagaaatcttctctagtaagggagcgcactccttcatggcatcaaaggttgcctcttctaattcaaatccaagactggcttgaaaacgaaagcctcgcatgatccggagtgcatcttcgttaaaccgttcatgaggaatcccaaccgcccgaaggaccttgttttctaaatcttctagtccatgaaagaggtcaacaatttctcctttttcatttaaggcaaaggcattaaccgtaaaatcacgacgcttgaggtcttcttctagcgagcgtacaaaagacacggagcttggacggcgataatcgacatagacatcctctgtccggaaggtcgtaatttcatattcttgaccattttcaaggaccaagacggtcccgtgttcgataccgacatctactgtccgatcaaaaatcgccttggtctcttctgggtatgaggaggatgcgatatcgacatcgtgaatcggacgatccaagagggcatcacggacagatccccctacaaaataggcctcaaaaccagctgctttaatcttctctaatattggtaaagcctcctgaaactcagaaggcatcttttctaatctcatagtaagtgttccaaaccatagacaagctcatgacgcttgacaacttctttaatccctagatttactcctgtcatgaaggaaacacgatcataggaatcatgacggagagtcaagccttcgccttggctaccaaaaatcacctcttggtgagcgactaggccaggcaatcgaaccgaatggatgcgcatcccttcaaactctgcacctcttgctccaggcatcaactcttcttcatctgctgcaccttgctggatcttctcgcgcttctcagagatcaactcagcggtcttaatggctgttccactcggtgcatcttttttcttatcgtggtgcaattcgataatttccacattcgggaaatacttagctgcttgcgctgcaaattgcatcaaaagcacggctccgatggcaaagttcggcgcgatcaagccacccaagcccttttcacgtgaaaggtctgtcaattcttggatctgctcaggagtgaatccagtcgttcccacaacaggcgcaaagccattctcaattgcaaagcgagtattttcgtaagcgaccttgggcatggtaaagtcgacccaaacatctgcctctagacccacaacatcttctttgtggttaaagacagggacacctgcaacctctgtctcatcagtaaatggatcgatcaagccagctaattctaactcaggatcttcagaaaccatcttgtaggctgcttgtcccattcttcccttgaaacctgcgataatgactttaattgacatagaattctccttaaacgatagggatatacccaactgctaagctatggtcacctaagtgcgtcccaatcacccctccaaaggtagcaaaaggaatatcaccttccactccttcttcaatgagcagttggcgaagtgcttctgctttttcagggacattggcatggatgacaaagacttggtaatgaccatctgcgatatctgatacaacaatctctaccaagcgtttcatggctttcttttccgtccggactttctcaaagacctcaatcacgccttcatcattaaaatgaagaataggcttgatgcttaagaggttcccaagaatggcagccccatttgacagacgaccacctttgaccaagtggttcaaatcatccaccatgatataggcggaggttccatcaatctggtgttggacattggcaacaatctcgtcgaaagaacggccttcaccagcccatttcaagcagtcttctaccatcatccctagaggagcactggtgatttttgaatccggaaattcgacggttaatccttcaaattcgtccttcaaatattggatattttggtagaaaccagaaataccagatgataagaaaagaccgatagcatgcgtatagcccttagctgtcaaaccagataggacttcttctaactctgcaacactcggctggctagtctttggcaattccttagacgcagccatcttttggtagaactcatcgtgtgtcaggttcttcccttcaacataagactccccatcgatatagatcgggatctctaaaataaataagtcgtcgtgatggagcacgtcttgcggtaaataggcagacgaatccgtaatcactgctaatttcattgattaaaactccaaattaatacccggtaaatcaagggcaatttctgtaacttcataagtcaaacggttgagcatatccaagcaaggacgtgccaattcttccacttcgtctttgctgaattcgcttggttcattgacataacgaccaaacaagtggttaatttgagtgatggtgccactgatcacaaagccgtcaaatacaatcatgtagctcaaaatcacaatcaaagaagttgtgttttgttgttgatcacgattgattaattgaaagtttacatctacttttgtttcgggaatgccattttctttttcccactcaaaattacgagcatcatagtggtattggctgacaaattctttttcacgttgaatatccatttttattctcctaaaaatatgcgttaggcttattataccataattcggctcaagataccaatgtagaatgaggtgattttttcgctgatacaagaagaaaaggtcggggaagtttagccagtctttaacttgttttgctcaattcttcgctaactcttttgtaaggatcgaaaaaacaagataaagacttttgaatgacgattagtcataataataccaaccgccatccctataaattcttatgggttgcatctcataaataccaaattcctttggtgtgctggtagcattatctaaagaaaaaccaaccatgaattttgtttgttcattctgattcacctttcctctaagggttaacatatagccaccaccttgaggtgttccattgcctacctgaccaacttccatactctcccaatcaaactggacgctatcaactttcgggctcaacgattttacaaaatcagccatttctttttcatgttcctttaaataagccagttgcttctctctagcgctaaattgctttcttgattgagtgccatttaaaaagatgttttgtttttgactagcgataatcacaccccctgcaattacagtagcggtggctaaaagaattgccagtttaccttttttcatgcttcatcctccttgataaggaaaagttataataattgtatcgaaatctatagagataagcaacttcatcactagttggtgtttttgcgcagtaaaaaaggttgggcattcccaaccttttagtcatgtttagtttttaggtttgcgaagcaatccgaacaagataccacttacaactgcaccgatcaatacgaacaagatgtaaagaagtggatttgatgtaagagcaatcacgaagattcctccgtgtggagccatgagtttcaagcctgcaagaccaacaagagcacctgtcaatgctgaacctgcgatgaagcttgggatggcacgagctgggtcagctgcaccgaatggaatggcaccttctgtgatgaaggaaagacccatgataatgtttgtcaaaccagaatcgcgttcttcttgtgtgaatttatctttgaacaaaactgttgccacgaatactgccaatggaggaaccataccagctgccataacagctgccataactactgaaccacctgaagttaatgtggctgcaagagtacctgtaccaaagacatatgctgctttgttaactggtccacccatatcgacagccatcataccaccgacaagaagaccaagaaggactgctgagctacctgacaagcttgtaaggaagttatttagaccagtattgattgctgccattggaatatttacagcaagcattgtaaatccagttaatgccacaccaattagaggcatcaataaaattgattttgcaccttcaagcgaacgaggaacttttacgtattttttaactaacaaaacaattccaccagctaagaaaccaccaacgagagcgccgaggaaacctgatgacacctgatgtgaagtaatcttcataatcgcttcttcagctgcttttggatccaagtcagcaatttttgcataagcgacaatatttccaaatgcaagacctgcttttgcaatagcaccagccacaaatccagcaattaaacctggtttttcagcaattgaataggcgataaatccagcaaggataggtaacataaaactaaaagcagtatcacctattgcttttaatagagctggtaattcgtggtaactacctaaatgcgacaattgtccttgaggaaccccaaggatttggtcaatcaagaaggcaagggcaatcaagataccaccaccgataacgaatggaagcatttgagaaaccccactcatcaagtgtttgtagaaggctccacccaagcttaatttttcttggcttgcgctagcttgtgcagcattttcagcgtggaagacttctgctttgccatccaagatggtttggatcaattcttctgtctgacggataccggctgcgactggtttagagatcaattttttgccatcgaaacgagcggtttcaactgctttatctgctgcaatgatgaccccttcagctttggcgatttcttcagcagtcaagcgattgccgacaccagatgccccgttggtttcaacgcggactgtgacacccatttcttccccttttttgatgagggcttcttctgccatataagtgtgggcgatccctgttgtacatgctgtaacggcaacgatgagaggtttgtcagatgaagctgcttctttgaccgtttctgcttttttcgcttcttcagcggcagcttcttgctcttctgcatcaaaggctgcaatgacttgatcaggagtgcttgcttggcgaagtttgtccgcaaatcctggtttcatcaagtacttagacaattcagcaagggctgccaagtgagtatcgtttgctccttctggagctgcaatcatgaagaacaagtctgttggttgaccatcaagagatgcgtaatccacacccttgtttgattttgcaaacaagaccgttgcttctttgactgcttcatttttgctgtgtggcatggcaattccgtcacccaaaccagttgaagtttgtgcttcacggttcataatcccagctttgaaagtttcaaaatctgtcaccacaccattgtcaacgagcgattggatcatctcattgatcacgccttctttatctgttgcttgaaggtcaaacaacatcacgtttttatttaaaacgtcttgaattttcatagtttttctacctctactttttcataagtttctttaatatagtccgctgtcgccaaatcatctgagaaggtggtcgctgtgccacaagccactccccatttgaaggcttcgatgacgtctcctgtcgttgcgagcttcccagtgaagcctgctaccatagaatcaccagccccgactgaatttttcacttgccctttgattggttttgcgaagtaagtaccgcttggactgacaaggagagcaccatcacctgccatggaaataatgacgttttgtgctcctttggccaagatttctttggcatagcgttcgatttctggcaattccgtcaaggtaacgccaaaaatatctcccaactcatggttgtttggtttgaccaattggggattgaactctaaggaatcaatcaaggtttgcccttcaaagtcgcaaaccacttgcgcacctgtcgcacgagttgctgcgatcaattgtttgtaaatgacatttccaagtgaagatggggcagatcctgcaaagacaactacatcatctgctgttaagctcgataagatgttgagcaattcttgcaactgagcttccgtcacttctggaccattcccattgatctctgtttcctcatcagctttgatcttgacattgatccgtgtatcttggtccactgtcacaaagttggttgaaatggcttcgctagtcagtacgtcttcgatgaagcgtccagtgaaaccaccgataaatccagttgctgtgttctcgatatcgagacgcttcaagacacgactgacattgattcctttaccaccggcgaatttatcttccgaagccatccgattgaccgctccagtctctacatgatcgagacggacaatatagtcaattgctggattcagtgttactgtataaatcaaacctctataacctccgttttttcttttaaaacctttaatcgttgcggttcacattgattggtaataatcatggctcgcttaataggagccactttgacaaaggatgtcaccccaattttcgaatcatccgctaggatataggtctttttcgcattttcgataatcgcacgcttaacagatccttcttccaggtctggagtgctgtaaaattcatcatcgattccattcattccaagaaaggccttgtcaaaattcaactgaccgatctgattgagcgcaatccctccgatactagcatctgtagaagattttaccttcccaccgatgatgaccgttggaacatttcgctcgaccaacttggtcgcgtggtgaatcgagttggtcaccacggttaccgttggattgacaatttcttgtaccaaaagttcattggtcgtcccggcatcgataaagatcacatcatgatctttgatcaattccgccgcttttacagcgatctttgacttaacttgaatgtttttgatagatttttctttattgctttcttcctcttgaagaaaatgcaggctttccgcaccgccgtgaacccgacgaagtttactttcagcttctaattcatccaagtcacgtcgaaccgttgattcagacgtccccagctcttgtacaagggtttctaaggaaacaaatttttccttcagtaccttctcgaggatgaattgttttcgttcagacttaagcatttctcctccttttgcaatcgattacaaggactattatactccatctccaaaaaatgtcaacactttttatcattttctatcattttctttcaaaaattctaaaattgtacaaaaaagcaggaaagaactcattttgttaagcgagttcttttcccaccttcatatatattctttgaagattttaagcaataaagtgtctaagcatccactctatcttcggtatgtcttaatcattttttgaagattgtttctttttcttaaaaccaaacaatccagcaagtagcccgacggcaacacctgttgttgctactgcatatttggaagaatctgtacttgccacagcttggctgttttcttttttgggtttgatttcttctactttagcttcttgttttggagctggagtagctgttggtgcttgcactttcgaactattggtagttgttggaagaactgttggtctatccgaaaaagtagttggattgcttgagcggatatccattggcatatctgctgcttctaaaatagctggatctatccgtgaggctagatcttcatattgggaattcaacagttccacgacactttgataagattgaagggttgtgaattctgcttccaatttttcttttttattctctaaattagccaccgcagctgataaaacggattgggctttgaccaataattctggtgcatttttaaagtcagaaagacgtttttcagcagcaaccaggcgctcttgagctgccttcaagccctcatgcgcttcttgaacgacttgggctttttctgcttcttctgcttttaaacgatctaatttctcacgcgcagctgccaacaaatctttcgctttttgaagggctgcttcttttggttggatggttgcttcaatccgacctcgagatacatcaagagtcgccttcgccttttcaaccgcatggtccttgctaacgagaagaatcttgtaattttggatggtcttttggacattggccatctctactgccacatttgaattagcatggcgggcgtcttctaatttgccttgcaagataatgatttgagactcttgattggccttgtccagcttgagattagcgacttcatcagattttgctttgacatctgatcttgtcgtcgtagccccagctccctgacgcaattgataagcgagtgcactggttgacactgccgatttgacaggactgtgtaagaaagctgcttctgacatggcattgctagggtcataagcgactgataaagctgtcgctttgttgtctaccatttggagatagtgaccaaccttagcaaaggcctcagccccaatcttcatatagatatcgttggcatcgatttgagtttcgtctgttggtagaccatattgagccgctacttcttgataagccgctttttcattgtaccaaaagtcaaccgcaccagcaggtgagaagccataagcaatgttttcgtttggcaaatacttaaacatatgccagttggctttcttgaagtattccaactgtacttggctggcaggaagggaataaggatccagctccaattcaggcaagtcggcattgcgacgatagttattaatagcatcagcaatttcaagagctcgaaggttggcttgcaaagatccagactctccaactgtcaagccatcttcttcccgaccacgcttgtagagggctaaagcactcgctgcagcttcattgccattctcggctaagtgttgcaaataaccttcataagtcgcttgactcaactgaactgggctattggccgctgcttgttctaaggctgccaattctgcttccttggtagcgatgaccgctttcaaatctgtcagacgcgtttgagccagttgaatatcgttctcaatttgagccactgcatctgaaccggtttgctgactcgcttgcaaggttgcaaggtaattctgagattctcggatactttgttcgacttgactttgctccaacaaagcctggttgagcacattctcatcatttgaaatcggtgctttggcttggttcaattcattttgtgctacatcgaccaaagattcttgagctgtgacttgattttcctgttgacgaacagcctctacaacttgatcatgtgcagcttctgcttctcgaaccttattttcttcgatagtcacataggcttgagccaccttgatgtcattttctgcattttgaacttgggcatcagaagttgttgcgatgaggttttccgcatccgtcacttctgctttcttttcttccagctcttgtccagcagccttgacttccgtttgagcatcgatcactttttgctcttggtagtggacatcttttaccacttggcctttttgagctgtaatttgcttcaactcatcaaccgtaattggtttttcgactacttccgtactattggtttctgcattttcattttgcttcacctcttccgcactagccttgtgattaaacataccagataggaccgttgttgcagcaatcccagtcgtgaaaaccgattttcctaatttctttcccattaaactcacccccaaaactgaattattttcttgaagtttctctaccccttagcataccacattttgttaccaataactagtaggtttaaaaagtttttttcataaatttttgaggcaaaagaaaaacagctaacgctgttagtcttcttgtttaatttgttccaacatcttctcttcttctgctgtcaactcatagttttctagcaagtctggacgacgttctaaggtctttttcaaactctgatagaggcgccactgacggatattttcatgatggccactcataagaacatctggaactgtcattcctctgtattcataaggccgtgtgtattgaggatactctaagagaccagaggagaaactgtcatcctggtgactggactcttttccaatcacttctggaatcaagcggactgtcgcatcaatcatagtcatggccgctagctcaccaccggtcaagacataatcgcctagagaaatctcatccgtcaccaaggacttgatccgctcgtcgtagccctcataatgaccacaaataaagattaattcttcttcctgagccaactcttctgcgtaggcttggtcgaaggtccgaccagcaggatccagcaggatcacgcgcggattctttttctcaatggcatcaaaggcatcaaaaatcggttgagctcgtagaagcatgccttgcccgccaccatagggttcatcgtccacatggcgtgctttctccgcgttttcacgaaaattatggtagttgatctcgagaagtcccttttcacgcgcctttccgacgatagaatgctcaaggggagaaaacatctctggaaagagggttaaaatatcaatcttcatcgtctaacccttctaagatgtctacatccacccggtttcctgggatatcgatattcaagactactggtgggatataaggcaagagtagatctcgtttgccttttcgtttcacgacccagacatcattggcacctggttgcaggatttccttgatctgaccgattagctggtcattttcgtaaacatcaaggccgatgatctcatggtaatagaattcgccatcctccaaatccgtcaagtcttcttccgcaaccttgaggctaaagcccttgaatttttcgatggcattgatatggtacatatccttaaacttgatgatgtcgaagttcttgtgcttgcgatggctagcaatggtcactgtttggacgaactgatccttctcatcaaagagagccaactcagctccttttttaaaacgctcttccgcaaagtctgttacagacaagacccgcatttctccttgtaagccttgggtattgacaattttcccaacgttaaaataattcattttattcactacatttctcttttaattaatttatctctacagttctctaataagagctgcaattttttccgattctgaccagtgtagatagtggtggtttccacctagaatgagttttgtatttgaattccaatattctgaatttctgtactctttttctctatacgcctgacaaaatacgaaaacaggaatattatctgctaagaacgaactatcaaaatcttcagcagtaatatttacagatagctgaaatccaggaacttgcttttccaattctaagctcttttcttccatcaatttccaaatcagtttttcagtttcagcttcaaatgttgcttgagttagccccttaaaataattttccggaccacattcttcgatcattctcatttgctcttccatttctggataaggattttttgaaaaatcagcaaacattatatttttggttgttggttcaattgctatcaaagcttgacacttaattggtttactcattaactttaaagccaaaacaccacttaaactatgaacacaaagtatataattggaaatttccaatcccttcaggatttcgtataccgcttcaacaagattatccaaattaagtcctgtttgactatgaatcggactcctacctgtattcggaaaatcaatcgttaagtaacccattgaggaaggaagtttttcaagtattggtaggaaattttcataacttggtatcaaaccagcaccatttaaacaaactagtattttatttccctttttataagtaacagatagacaaccaatctttgtagatacttcaaatcggttcatatcaaaataactccttctgaacaaccattcacttaacattcttaggttttattttatcacgttcaagggattttctcaaatgcccttttttactaaaaaaccttccaaatcttgttcatgctgatacttgatggctgccttcttgtctttttcaaaaatggtcttcgttaggtcgatatggttaatagctgcaattgccactgtgtagtgaatgatatctgccaactcctttgccaattcctcgtttgaatcttggacaccctcttttctacctgaacgtccatttaaaacctcagcgacttctccaacttcttccactagtttgataaaaagtccttcttctgttctagattgttggtaatgatcaagtaagtattcctctagttgtctaattgttaaatctctcattccttctccttgcaaaaaaagcgagaccttgtcccgcttttcttatttttcgtcaataacgattcttacttttttatcttcagttgggacagagtagacaatcgttcttatcgcagaaatggtgcgaccttttcgaccgattacacgaccaacatcgctaggatcaaggtcaaggtggtactccaagaattcaggagtatcttcgatcttgatggttaaagcatccggttgtgaaatcaagggtttcacaattgcaataatgagattttcaatcgtatccatacatcaacctacttaaaaaattattttgagaatttagaatcgtggaatttcttcatcacaccagcttttgaaaggatgttgcgaactgtatctgaaggttgagctccatcagccaaccatgcaagaacgcgatcttctttcaaagttacttggttttcttcaacaagtggattgtaagttccaactgtttcgatgaaacgtccatcacgtggtgaacgtgaatctgctacgttgatacggtagtaaggttttttcttagaacccatacgagtcaaacgaattttaactgccatttttataagtctcttttctatattttaattttcggtgaaatagacaagctatttagcacatgatctattataacacattttatagacctgtcaagaaaaaaacttgacactatgtaatttttttattttatcagtaaatcggcgatttcttgatagttgctaacggtataagtcggcactacctggctggtattttccttatgatcagggttataccatacggtagcaatccctgcagcattccctcctgcgatatcagctgtcaaagaatcaccgatcatgagggtctcttccttgctaaaccctggaatcagctggcctactttgtcaaaaaatgcaggttctggtttctgagtatgaagttgttcagagataaatacctctttaaaataaggtgcgatggtagaatgagctaagcgtccttcttgaatggcagtcactccgttcgttgcaccatagagctggtaacctgctttttcaagtcgtgccagtaagtcctccgcccctgggaaagactgcccttgaagactgatgtaatcctggtagcgaagagccatctcggccccatcaactgtgatcccaaagtgggcaaacccaatcgcaaatcgactatccacgagttcttgtttggtgagcttcttttgttctaaatccttccagagcccttggttcataggtttgtagtaatctttaaaggcctctacatatggaaaattcatgtcttctaaaatctgcgtcaaagctgtttcttcagcagattcaaaatccaacaaggtatggtccaaatcaaaaagtaaaaatttatatgccattacaaacgatctttcaatttttctacaaataaataagctgctgggcaagtgagcgtatttttgatggtgagatggttgatctgatagatcttctttctatcggtgtgaggaaattcccgacaagctttcggacgaacatcgtagatggaacagaggttatctcctcctaagaaagggcaaggcatggatttaaaaaccttatccccatcctcgtcaacttgaagaaattctgcctcaaaggcaggaagcttcatcttgaaatacttggcaatccgcgtgatatccgcttccttaaaatcgggccctaaggtcttgcagcaattggcacaagccgtacaatcgatttcttggaaaacttcatcgtggatttcttgcgctattttatctaaattcttaggcagcttcttcttgagattcgccaatatcttgcggtgctccttttgcttttggagagctaactgatggtatttttcaatatcaatttcctgtgtcatcctctatttcctcttctaaacaatagaaagattataccacaaagactctaaaaaaagatagatcctgcgatctatctcacttgattaatccgttacagcgcctgttccatccagactccaagtgttttcgacataaggagtaaattgagttattgttttctcaaatccttcaacaacaatcaaataaaccttatcatctttttggaatacccaaccagcaacctgcaggcctgacttgagaaaaatatgtattttaagcgactcatttcctccaacagtcgtcgtagattttgtcattttctcaacaattttataatcattccacctactctccaatctttgagctattagctctgcattaaattccactccttcagggacatttgctttttctctagtggcagcatttaaaacaataatattgaaggcgtttttatctgtatactgaatattatctccgacttggatattgtcattctttttccagtcacttggaatattgacatagccataatctgctgatccaattcgtttcgttttcacattccccttatcactatctggaatttttttctctacattactacttgaatttgttgtctctctcaccacattcgtggaactagatgctgccgatgatttactagactctttctttggactagtacaagcagaaaggcttacaacagacaaaaacgtaacagacgcgagtaggaacttatttttcatattctctcctcaatgatgtattttctttccactagtctaccatgattatctaggatttgaaagtgcgatttctatagcataaagagactagaaatgattctagcctctcttcatcaatccgttacagcacctgttccatctaggctccaagtgtcttcaatgtatgggataaaggttttcaaggtttctgcatccccttcaaaagaaatggtataaactttttcacccttctggaaaatccaagtaatcaagtattgaccggatttcatgacaatttgaagctggtaggcgtccagacctgagactttagtccgagctcccgtcatcttcccaacatcctggttatcttgccacattacagccagtttcttggctagaaattcagcattaaactcgatatccgcaggaactttggccttttcccgcgtaaagctgttcaaggtgacaatattatagccactgccatctgtatattggacagcttctgtcccatcgatatccgtgaacttgatccatttacttggaatatcgatgtaaccataatctgcatttccaatccgcttggtttcttgactagaagtgtttttctttgtagaagaagtatcctttgacgaagaactgcttgtttgcttttcgactttgctgctactttcttttgtagaagaagctgctgtgtccttttgagtggtgtgactacaagccattagtgtgcaggcagaaagaatcgtcaatgatgtgacccataatttgtgtttcatgctcaacctccttgagaacgttttctctcctctagtctaccatgaaagtgagtattttaaaataggataagtgtcacatctgatccaacctttctaatttagtttatttcttttgaacctaaaacaaaaggctgggacaaaagtcctagcctctcaattatttttggattgtcgagcaagacgcagtagttgagtgggctctactacgctgatttcatcagtttttacagccctactcaactgtgcggaggtgggacgacgaaatcgaattctaacgaattaccaatttctgtcccactctctaattgttattcttcatccattgacaagacagataagaaggcttcctgtggtacttctacagatccaatggccttcatccgtttcttaccagccttttgtttttcaagaagcttacgtttccgtgagacgtccccaccataacacttggccaagacgttcttacgaagggccttgatatctgtacgggccacgatcttatgaccgatggctgcttggataggcacttcaaactgttgacgagggataatcttcttgagtttctcaacgattaacttaccacgttcataggcaaaatccttgtgaacgataaagctgagggcatcgacagtatcgccattaagaaggatatccattttaaccaatttagaaggacggtattcagacaactcataatcaaagctcgcatagccacgagtagaggatttcaatttatcaaagaaatcaaagacaatttccgccagtgggatttgatagatgacatttacccgattttcatcgatgtaatccatggtcacaaaatccccgcgtttccgttgggataattccataaccgccccgacaaactcttgtggcaccatgatttgggctttaacatacggttcttcgatcgaagcgatcttggttggatctgggaactcagaagggttggagacatccagtgcttctccatctgtcaaattaaccttgtagataacagacggtgccgtcataatcaagtcaatattgaactcacgctccaaacgctcctggataacgtccatatgaaggagccccaagaaaccacaacggaaaccaaaaccaagggcctgagaagtttccggttcaaattgaagactggcgtcattcaattgcaatttttccaaagcttcccgaagatcattgtatttgttagattcgattggataaagaccagcaaaaaccattgggttcatttgcttgtatccatgaaggggctcacttgctggattggtcgctagggtcaccgtatccccgacacgggtatccgcaacggtcttgatagaggccgcaatatagccaacgtctccagttgcaaggaaatcacgtccaactgctttaggagtaaagatcccaacttctgtgacatcaaaggtcttgccattgctcatgagctggatcttatcgcctggtttaaccattccattgaccactcggacctgaaggattaccccacgataggcatcatatacagagtcaaaaatcaaggcttgaagaggggcttcaacatcacccgtcggtgctggaactttctcaacgatctgctccaaaatctcttcaatcccaataccagctttggcagaggctaggacagcttcactagcatccaacccgatgacatcttctacttctgtgcgcacacgttctggatctgcagctggcaagtcaatcttattaatgactggcaggatttccaaatcattgtccagcgctaggtaaacgttggctagagtctgggcttcaatcccttgagcggcatccactacgagaatggcaccttcacaggcagcaagcgaccgcgaaacctcataggtaaagtccacgtgtcctggtgtgtcaatcaagtggaagatataggtttccccatctttagccgtgtagttcaactcgatggcattcagcttgatggtaatcccacgttcccgttccaggtccatgctatctaggagttgggcttgcatctcccgactagacacggtttcggttttttctaaaattcgatcggccaaggttgactttccgtggtcaatatgggcgatgatcgagaagttccgaatcttctcttgtcgtttttttaattcttcaaaatttggcataatcatcttcctagtaaatttaatcgtactcctcattataacaaaaaagataggcctttgcctatcttaattcattattttcaaaaatcgcttctgcgttttatttccctcatagcctatgtgttcgtaaaagatatgggcttcttttcgatgagatccagaatttaaacggataaaagcagaatgcctgcttttggcaagttcttcaactcgctccatcaattggcgaccgatcccacgtccttgagcagatggaaaaaccgcaagacccaaaatatttaaaccagcgtcactataaaggctttcatagacttccgcttccacataaccaagaatatttcctgtttgttcctcttcataaacaaagcaaaaatgatctgaatctggcaaattaaatttatcaatctgagctgccactttctcaagggttgaatcataacccaaagactggtgacataaatctctaatttgacctgcatctttgacttgaacagtacgaatcatagctccacctccatgaactctttgctcttatcttagacctttttcctcaaaaagtaaaggaatacccgataaaatttaaaatgaaaatccgatttagatcaaattcatcttttttcgcatttctcaaggatttctatttactttttcgatttaattcattataatagtaagggtaaatacaaggaggtgagtacgttggctagaggtcgtggaaaagcaagccctcaagacaaagaggcattacggattatatcggaaaagattagagaattactgaaagaacaaggaaaaaaacagatcgaattatctcgtattactggaatccctgcaagtaccctgactggatatgtaaaaggaacttctcttcccgttcccgaaaatttagagaagattgcagcctttttccaggtagcagttgctgatattgaccctcgattgcgcaatgattttgtagtcattgattcagagattgaacgattatataaacagcttgatgaaggaaatcaagaaaatcttctttcttacggaaagagtctcttgacccatcagaaagaaagacagaaaattgaaaagcaataccactcgtattctgtctatgattcttttgcagcataccaaaatcagaagcaagctgatatcgtttggtttgatcaaaagattccttacgatttggctttttggattcatacggattccctcgagcctaaatacgaaaaaggggctgttgtgttaatcaagcaaacctattatgatcaggcaggggctatttatgccattgattttgatgggcagaccttgatcaaacgggtatttcgtgaggccaacggtattcgactggtttcccttaataagaaatatagtgatcaaatcattccactagatgaggaacctggggtgattggaaaagtgattgatggctttgttcctattgatttggaggaaatcaaatgattaaattaattgcgattgacttggacggaactcttttgcatgaggataagactctatctaaaagcaatattgaagctcttcaccgagcccatgaagccggctatgacattgtaatctgtacgggacgccccttagcgggtgtccgtcctatctttgaagagattggactccctgatggcaactactatatgattatcaataacgggtgtacaaccttgtctactaagaattgggaaatcattggcaaggaagaattgagccttgaggacatgcataggttgcatgttttgacggaaaatacagacgtccagctaaccttatttgacatggatcactacttagtggtcgcacctgaagccagtgaacttgtcacgatggatgcgggcattgttaatagtaaaccgacacttgtctctgaagaggatctgtccaaccttgttcctatttttcaagccatgtacgtgggagatccttctgctattgatgacttccaagctcagaacgaggctgcattagaggccgatttcaacactgtacgttcacaggatatcttatttgaaatccttccaaagggagcgagcaaggcttctgctcttcaagcattaagccaaacattaggctatagcagagaccaggtcatggctcttggagatgccaataatgaccttgaaatgctacgttttgctggttacagcgtcgctatgggaaatggcaatgctgctgtcaaggaaatagctgacttcatcaccctgaccaatgatgaggatggtgtggcccatgctattcacaaattaattgaaactaaaaaaggagaatgatcatgaaatacgcaaatttgttggaccgttttattacctatgtaaaggttaacacgcgttcagacgaaaattctacaaccactccaagtacccaatcacaagttgattttgcaacaaacatcttgatccctgagatgaaacgcgtggggcttcaaaacgtctactatttaccaaacggctatgctattggaacacttccagctaatgatccaagctttacacgcaagattggatttatctctcacatggataccgctgacttcaatgccgaaaatgtcaatccacaaattgttgagaattatgatgggggtgtcattacccttggtgactctggtttcacactcgatccagctgattttgctcatttgaataactacaagggacaaaccttgatcacgacggatggtactactcttcttggtgcagacgataagtcaggtatcgctgaaatcatgacagctattgaatacctgacagctcatcctgaaatcaaacacggagaaatccgtgtcggctttggtccagatgaagaaatcggagtcggcgcagatcaatttgatgcagaggattttgacgtagactttgcctatactgtcgacggtggtcctcttggagagcttcaatacgaaaccttctcagcagctggagctgaaattaccttcaaaggacgcaatgtccacccaggtacagccaaaggtcaaatgatcaacgctcttcaattggccattgatttccataacaaactccctgaaggagcacgtccagaattaaccgaaggctatgaaggcttctaccacttgatgaacatcgatggaactgtcgaggaagcaagtgccagctacatcattcgggactttgaaactgaaagttttgaaaaacgcaaagacctcatgaaatctattgccgatcagatgaatgcggaactcggtagtgaacgcgttctcctcaccctcaaagaccagtactataacatgaagcaagtgattgaaaaagatatgacaccgattaccctagctaaggaagtcatggaagatcttggaatcactccaatcattgaaccgatccgcggtggtacagatggatctaaaatttcctttatggggattccaacaccaaatatctttgccggtggcgaaaacatgcatggtcgctttgaatacgtaagtctccaaaccatggaacgcgcagttgataccattatcggtattgtgaccaaaaaataagaaacaaaaaaggattcggattatacatccaaatcctttaaatatcattgagaatgtaccgaaactttccgctgtgagaaaagtgctagaaacacacttgtttctagcactcgggagttttgagacctcaggctcaaaactaagtcatggaacttcttcgaagttcgctgacgtccgtactcacctaaggaaagttttaaaatataattttattttcaatctaaggattcggatagtttgtccggatcctttattgtctattagaaagcttgacaatatctttgacctgatcaatggtctgaatcaggtgaaggcttgtctcattaataggaagataatagactttatctgccaaagattctgtaaaaggacgattcgtgactaagatcacctgttgtcctttttctttcagctctttcacttgctttctcaccttttggtaaaaacgctcatcactgatttctaaatcatccaccaagacacaagcagcgtccaaacccaatgattcattggttccattctgggtcagataataggctgctcccgctttgacctcatataagccagctgatggctcaaccggaagaaaggctgggcttgttgcaacttctgctactttttccattgctacaagattggctaggacctgcaaatagacaggtgctaatttactcaaatccaagagttcctcaaactcaaaaccacgtttcaaagcttctaagatatagaagagccggtggggcatatgacgagcaattttctggattaattcatcatcgctcatttcctcaggaaggatggtcagcaagttcttgtctttaatggtttctagggcttgttgataagcctcatcgattctcttcccaaatccataaaccgccccataagagtgaatttgggtattgaggcgggcatttttagcagcatcagaaaaaatcggaatcttaaagaagatatagtccaaacttggttcgtaaacggcctttaaatcctttaacaagggatgaggcagatgctcgagagagcgtcccaattgtaactgaacaccttgctcaaataaggaatagcccaagcccattgaggccatcgagatactgtctgaagcaaatggattaacttctaggatataaaaagcatagctcgtcggatccaaagcaaacttgatcgaaatggctcctgtcagcttcaaatagcgactgatgtggatcgctgcttcacgaagattttgaaactcccggtcagtcagggtgaccgctggcataaattgataagagtcactagagtggatcccgacaggatcaatgctttcaatagaggctgccaggtagtgattgtcttcgcgatcgcgcatgaccacaaaatccagttccttaaagccataggtcgaaaactctagcaaacactgctgacttggagagaccgaaagtcccgtttctactgcttcgcacaagtcatccaagttatgagcaatctttcgcccctgcccttgcttactcgctaccggccagatcataataggaaattgaatgccttcagaaaactcgatggcttcgcgaaccgaaccaaccagtgcggaagcgggtacctgatagcccaactcttgaaagaggcgtcgttgatccgcctgctgataaaaactacggtagcgttggaggctcggtccgataatcatgatcgatgcgtctttgaaaaatccagtttcttccaaacgaaacaagaggttcaaaatctgtttatccgcaaaggttaggagcaaacgagatcctgtataggaaagaagagtcgtcctaagagcatccaacttgagcttactgactacaacctgttctccagcttcctgtgtgatagcattttcttcacccagataaaggacaagagcattcccgtccttgacattaagtttttgtgcttcatttaccgcagccaagaggctaatatcctgataagaatctccacataggagaagcaatttctggttttctttcatcattccttctcccttctactttcgtgaattttggcatcaatcaactctaaaaattcatcgtaaaaatagagattttcccttggccctggactagcatccacttggaattgaacccctaaaatcggttggtaacgatgacgaaaggcttcgatactatggtcattgacgttttcatgcgtgaccaataaatcatgaggcagactatcgcgtgcgatactatacaagtgattttgactcgttatctcgatttttcctgtcgcaatttcacgaacaggaatatttaatccgaagtgtccaacttccatgggagctagctccgctccataagcttgagccagtacctgtgctcccaagcccatgccccagatcggaatttgaccattgattttttggatcaagcgacagagttttttcacctgatggggatccccaggcccactggataaaataacgccatcgggctgctgttccatcagttcatcataagagatgtcatagggatagaccgtaacattacagtccctttgactcagctggcgtaagacagagtgtttgacacctaaatcaatcaaggcaatactctttccaaaacctggtacagcataggccgtttttgtagaaacttgacgcacttggtctttgggaaggaccgttgctcgcaactgatccaagatatgctcgatcgaatcccccttgttaatgacagtcgccttcatccgtccatacttgcggacaatttttgccacctgtctcgtatcaatccctacaataccagggattttttttcgcttcaagaattcatccaaggtcatctgctgccgccaattgctcggcatctccactagatgctgaacgactactgctaaacaagtgggcgtaatcgattcagaatcatctcgattgatccctgttgcgccaataactggaaaggtaaaggagaggatctggccactaaaagcctgatccgtgatcaattcttgatagcctgtcatggctgtcgtaaagaccaattcaccagtcacatataagtctgcaccaaaggcttctccttcaaatacagtcccatcctctaggaccaataatcgtttcatcgaacccctcccttctttttacactaatccaattttatcatagttcctcaaaaaaaggaaagtcagattccatgtagctgtctactctgtcctcttcctttcctttcaatgaattgtcagttatcttattttgcaccgcgacctttaaggacggcttcaatgatggccatacggacaaagacaccgttggtcatttgttctacgatgcgagatttaggagcttctaccaagtggtccgcaatttcaacgtcacggttgactggtgctgggtgcatcaagatcgctgtatctttcatacggtcataacgttcttgtgtcaaaccgtgaagacggtggtagttttctttagagaagagtgattcgtaatcatgacgttcgtgttgcacacgcaagaacatcatcacatccacttcttcaatgacttcatcgatagtgacgaaggttccatagtcttcaaattccgcacttctccattcgtctggacctgcaaagtagagggttgctcccaaacgtttcaagatttgcatatttgattttgccacacgtgagtgatccaagtccccagcgatacaaactttcaagccatcaaagtgaccgaattcttggtagatagtcatcaaatcaagcaagctttggcttgggtgttgacctgaaccgtccccaccattgacgatagatgcagtgatcgttggactttcaaccaattctttgtagtagtcgacttcagggtgacggatgacacagacatctactccaagagctgacatggttaagatggtatcgtaaagtgtttcccctttgttcacagagcttgtcttcacatcaaagtcaaggagatcacatcccaatttcaactctgccacttcaaaggctttgtgggtacgagttgaaggttcaaagaaaaggttagagatgatgtgttggtcttcgtaagctgctttagctccgtttttgaactcaatcccacgtttgatcaatgccattacttcttcattggtaagagtttccattgagacaaggtttttaagagcgatttgattttcagacatgttgattctccttttataatgtgaatgcaaatagtttacaatttgtttaagcttctttgatgaggacgcggtcttgaccgtctagctccaccatctcgacaatgatttcctctgacttacttgtcgggatatttttcccaacaaagtccggacgaatcggcaactcccgatgcccacggtcgactagaaccgccagactcactcgagcaggacgaccgtgactgaccaaattgtcaatggcagcgcgaatcgtgcgacctgtatagaggacatcatcgatcaaaatgacttctctatgagcgatatcaactggtaagaccgtcgtatcctctgtcgccttcatatcatctcggaaaggcttggtatctagttctgctacagggacatcgatttgttccagctgagagaggcgttcttggatccggcgagcgatgtaaacaccacgcgtcttgatccccaccagcacaatctggcttaaatctttgtttcgttcaatgatttcgtaagtgatccgggtaatggcccgtttcatcgtcaaatcatcaacgacttctttggttttcattcagtcctccttagttgtaaaagaaaaacctcctttttcaaggaggttcagcaaatgaatggtctaagaggatagagtctcgctctatggtcctagccattgtttttcacagtctccttgcctgcctcacgggacaggattaaaggatttatttaattgagataactatatcacagtttcaaacgacatgcaagaaaaaactcaacatttttcaaaaaaatttaaaaatatttcttttcgtccgaataacgttcggcttttactcagaaacagccgattttcgcttgatatttttgatcccatagagcacatagccagccaagagataggcgataaaaatgatcaccacccatttgccaacaaaggcccagccgtatttattaacattgataaagaaataggcaaagggactatcttttgcacctggaattggccacttcaagaccaatccattgagaagggcaaagagcatgtaagccaagggaatcgaggtccaaaggaagggatcgagcttacggtattgcttggctttatcaatcactagggtatcaaagaagaacattaaaggaacgatgtaatgacaaaggaagttttccaaacgataaaacttctctggtgtcgccaaaggcgccaacataaagtggtagatgacaaaggtaatcataatagccatagtcactgcccccttcatgcgaaggtagccttgggtctgggtcgaacgacctcgaaccatgcgccaaaccatatctcccatgaagaacatgaccaacatgttggataaaatggtgtaatagagcatcatgccaaagccaccatgcttggtcagttgcagataaacaccgagcacacttaagataaacaatagaaaacgatagctaaataataatttgaatttcatagtattctcctgaaagaaaaggggctaggcccttcttcttttctttagattttcttcacaaattctgatttgagtttcattgcaccaaagccatcaatcttacaatcgatgttgtggtctccttccacgatacggatatttttcacgcgcgtaccttgtttcaaatctttcggtgcacccttcactttcaagtctttgatcaaggtcaccgtatcgccatcagccaatttgtttccgttggcgtcaatcgctacgacaccctcttcttcttcgacctcagctgggttccattcatacgcacactctgggcataccaagagcgctccatcttcatagacgtattcagagttacattttggacagtttggtaagttattcatttttatctccttattcaaattaactttcatagtataccatgaaagcgaaaatttgacaaatcctgctcgactgtagcattttcaataaaaaaggaggcgacttggcctccctacacggatgatatttctcaatcttcctgcaattcttgaatgtctcgaatcacgcgcacacctgcttgattcttctcgcgcagttcagcatcagagtaaggaaaggtattgatcaagatactctccatcccgatactttgggcaacagcgacatctgtcgtaaagtcattccccaccatgaccgttttctcagggttcaactggtgctctttcatcacttccaagagaaactctggctgaggtttgcgaatacctgcatcagatgacaagtaaatggcatggaaaagttctctcaaaccaaccaaatcaatctccggattggtaaaatctgcttgggcattggataagagaaagatccggcaacctgcagctttcatatcctctaatacttctttcgtgtgaggataaagctccaatcgtttgcgagaaaggacacggaaagtccgtgaaatcaaacgtccccactctttgaggtgggcaacactgtttccacttggatgactttctaaatacaattgcacaaaaatgaccgtcagatcaatctcaggataggcaacttgtttttccttagccaagtcttcttcggcttgttgcaccaactctctataacgcaggcgcagaccttctcctgtgtaacttgccccgtaggattggtagatctgagccatggtatcccataagactggactcgactcatcagtttcgatgtcgactaaagttccataaaaatcaaaaatatagtttttaaatgcgtacttgcgcggattcatctctcacccctgtgacaaacatggtaaaggttgccttgcagacattggcaccgtcttgattggtaatatcgacatccacaactcgagtcgtccgcccaccgtggacacattccccgtgaatggtcagaacatcccccagagcacctgctttcaagtaattgatagaagactgcaaagtcacaccatctactccctgtgaaatcacgaccaagccactgatctggtcacacagggtaaagagatagccaccgtgcgcatttccataataattgagagaggattcaacgactttggttgtcacaatgacatggccatctctcatctttttaatatcataattttcaaatgcagcaatcgcatcgaagtgaaaatctttcatctatttgccaccttttctagcatcttttcaactcctctatcatactacaattaaggactagatacaagaaaaggggcagttccttagagctaaaaaagaactagatagttctagctctttgcttaaaatcttaatttttcccaaccatcgtctgtccgtttgcgataatagtactcggataaagctgagtcttccatcacttccagcagaggaagcatgtcgtaggacaagtccaacttttctaattggtccttctcaacccaagaaacttctccttcatcagacgatctgagctgacctgtgaattctgttgccttgtagcaaaagacaatatagcggcctccatcgtctagtggccagtctttgactgcgacgagttttggatctacgatcgtaaggcctgtctcttcgtaaacttcacgaatgacagattctacaaggctttctccttcttcgatatggccacctggaaaagcatagccagcccagtgagtcttttcaggtgagcggtattggaggactactttcccattttcaagatcttcgaccatgcaaagattgcacagtatagtaggcgttgtacgtgacatatatttcctttctatgatattgacaattaatcaatataaacttttttctttatctcttttttcatcacaaagggatttaccagctcatggtattcatcaaaggcatctaaaagggaacctctctgaaagacaattgacttctcttttaaataatactccgagtgaatcgttaccgaaccatgaccatcaaaactaaagaaaaacacaatgaataatactaagatcaagctagcaaagaaactaaaaagtagccccactacattcttccaattgactgtgtgagttcgataaaagcgataccagatatgacaaaaaactgtcacagctcctagatacaaccaaggattccacacgagcggagtaaaggcgtagccatagaaacctaaaaggacgttagcaaacatgaaagtcagtaaaagaatataaacaatttgaaatacttttatgagtttaatcattccttatttctcttctttttcctcaattttattatgaacaagatcaaggccgctataatgaagaatatcgcataggtcacgataggaaaccagatgtatttcagattcaaagtgtaaagcggtggaatataatctcccatgcgtcgccctttgatcccaaacccaatatgcacaacagacgtaattgcattcacgtacaaaaagacggttgcgaaatattcaatggaagctcggtcttctttctgcactcgaaagacattaaaatacaatccattcagcactaaatatagattcatgaataagggaaatagataattaaaatcacggtaagtccttgggattagatgattgtcaaaaagaaagacacctagggccgctcccattgccaaaaacatgaaaaaatctaaaagcataccaatacctgaatgcttttcaagccacaggtttaagcgatctaaccagcttcttttactctttattctattttgatggttgaccttctttacagtatttttcttctgcttcattaccctcatttcctaacgttaaggatttactcagagtttcttgacttctgctgctactttttgaagatgctgttcacggatgctagcggtattcatatctcggccgacttcacctaaaatacagacacgcttggtttttatcccacagtggttcaagacggcattcttcaaaacagagatgccataactatcaggaatgttaagaggacctgaaaaaatcttgtaccaccaagtaggcgccatggaggttgcataaatactggcggtttttcctttaagcaacttcttaaattgcttgcctctgagataattccagataaaactgccctgatcattggacgagtaggcaatccccggtgtaaagacccgatcgatccagcctttcataaggctcggcatactactccaccagatggggtagacaaagatcaggtgatccgcccactggatccattcttgagaacgaaggataaaggaatcttcctccatccgctttcgataaccgtagcgaagaaccggatcaaagtcctcttcattgagactgatcactttaagttcgtggcgatttgagtcaatcgattcgacaatggtttggaaaatagcctgacagtaactttccttatcgggatgcccattgatgactaaaattttcattcgtcttctccttcatctctttggttcattctatctcttttatatttttacttgattaattgataatggttcaaagattgatagatacgtcctttaggaatttttatttgaagaacatatcatccgcaattccttaacaggttttccaagttcaagtattttttcttggccatcaaaagtaaaacccattttttgatagaaagcaatagctcgcttattatctttcaacacccataaataaatctcagagaaatgatcgagagcagcaaatgcagcatgcattaacttttcactcacaccttttccatagtaatcttttaaaacatataaggcaatgatttcaccagcttgaatggcctcatcacgaaaatttccatagctgataaacccaacgaccttctttccatccatcgcaatcaaggtattttctggatactgttgactaaagaatcgacatttttctaatgtcatcgtctcctgaaaatccgcgggtaaaagatcgtcataagcctctctccacgtttgccaatgaacgagagattttccttctatctcttcaggagtttccattgttttaatgataatcttcattcgctttatcctatctaatccaaggccttgacttctaacatcatatcgcggatctgtgctgccaattcgaagtcaagcacttcgacagcttcttgcatttgaccttgcagtttcttgactagttccttgcgctcttgacggttgagactggtgatatccacttccttgtcttcttccttagccaccgccttggtaacagagataaggtcacggatttccttcttgatggtttgtggcacaatgccatgctcttcattataggccatctgaatctgacgacggcgggccgtttcatcgatggctttttgcatagactgggtcatagtatctgcatacatgatgacgtgaccctcactattacgggcagcacgaccgatggtttggatcagaccacgttcattacggaggaagccttccttatcagcatcaagaatagcaactagactcacttctggtacgtctatcccttcgcgaagaaggttgattccgaccaagacatcaaagacacccagacgcaaatcacggatgatttctgtccgctccaaggtcttaatgtccgagtgcatgtatttgaccttgacacccatttctttaaagtagtcggtcaagtcttctgccatctttttggtcaaggtagtgacaaaggtccgctctccgcgttctacacgcgcattgatctcacccaagagatcgtccatttgacccatggtagggcgcacttccacctcgggatctagaagacctgtcggacgaatgatttgctcgatgatggtatcggtttgttccatctcatagtcgcctggtgtcgcagacacataaacaatctggtggacatggctttcaaactcctcacgacgaagtggccggttgtccaaggcagacggcaaacggaagccatagttgaccaacatttccttgcgcgagcgatctccattgtacatgcccttgatctgtcccatggtcatgtgactttcgtcaatcataatgagaaaatcttctgggaagaagtccaaaagggtgtaaggtggctctccctcactccggccatccatgtgacgagagtagttttcgacgccgttggtgtagcccatctccctaagcatttcaatatcatactcggtacgttgttttagacgttgagcttctaagagcttgccttctttctcaaaaaccttcaactgctcttctagttccgcctgaatcttggcaatggctacttccatatggtcgtcattggtcacgaagtgagtggctgggaaaatggctaagtggtccacatctcctagaacctggccggtcaaagcttcaatctcacgaatccgctcaatctcatccccgaaaaactccacccggaaggcatgttcatcacgagaagctgggaaaatctcgaccacatccccacggacacggaatttcccccgttgaaagtcgatatcattgcgctcaaactggatatccaccaagtcgttcagcagtttatcgcgagaaatctcgagacctgggcgcaaactgaccacgctgtcggaatattccttaggcgaacccaacccatagatacacgaaacagacgcgactacaatgacgtcatttcgttctaaaagagcggaggttgctgagtgacgaagcttgtcaatctcatcattgaccgagctatctttctcgatataagtatcgctcgatggcacataggcttctggctggtagtaatcgtagtaagagacgaaatactcgaccgcattctctggaaagaattccttgaactccccatagagctgtcccgccagcgttttattgtgggcgatgaccaaggtcggcttattgacctgggcaatgacctggctcatggtataggtcttccccgtaccagttgcccccatcaagatttgggccttctcgcctccctcgatgttatccaccaactgctcgatggcctgcggttggtccccagacggttggtatttggatactagtttaaatttgttatctgtaattcgattaatcatctctttgtcctcacatatatagaccttattttaccataaatcaccagaattctctgagatgaggaatgaagagagaagacaacatgttacagaacgatccattaaattggtacatgagcgaattacaatctaattaattggacacgcattagcataaaaactaaacaagactctcgcaattacttcgaaagtcttgtcttttattctaaaaccatgcaatacgtaacaagaggctgggacaaaagtcatagcctcttaattgtttttggattgtcgaacaagacgcagtggttgagtgggctctactacgctgatttcatcagcttttacagccctactcaactgtgcggaggtgggacttcgaaatcgaattctaacgaatgaccgatttctgtcccactctcccaaaattagaaaagtttgctcatcagtatcatttttatttactacttaacttcttgattccttaccaagaagtagagagttgctccaagtgaacataccagtccaataacgtaaatacagagttgcagattggaagctctccctaatattgtatctgcaacaatattataaaataggtaactagtcaatggttccactactctttctatgaatggttgtactaaaataggaaatagcaataaaatagctaaactccccattggacttttgaaaaaataacttaaaaagtaagaaatcaaaaagtattggatggagccaatcaaataaaagctgaaaatttctaaaccgacaccattttcgctcctataaaattgaaaccatataagcagtacaatgaaatttaaggttgattgtagtactacatcacataactctacgaacagaattcgaattgaacttaagatcctttttccacttaccaaataaactagttttgtttcgtgtgattgtaactcaacaaatgcattaacacacccaatactaacagagagcattgaggcaaaaacaagagcttgctttatagataattgtacaacagtatcattgattgaaactggtaacacaccgaagagacacacaaaacctatcaaaagtgactgtatggctatctggtactttacaggttttaaactatattttttgacgataagactaaataatattcttgccattcttcctcctcattcgaatcatttctacaaccattatgaacaccaagaacaagatcccttctactactaaaagtgtaaagccgtacaattggctcgtttgagtcccttcaattcgaccaaatgcaaatgactttgctccaatcaaaggcaatagattttctattttagaggaaattcctcttagaatacctgataaggtgattaccaataataaaacgtctgcaattaatgcagtcattggttttttcgttacgattacgaaaagtaaagctaataaagtaagaacgattgcaaatatcataattcttaccgtgacatctaagaacaaggtcaattctaaatgattctttagagttgaatctagaaaaatgagtaagataacagcatttactatagaaattattaaagtagaaagtaacgataggacaattgaacttgcaataaacccagtaagacgaactttccagttaggaatcaataactggctaaaataatcatcaccaaatttataatgggttgaataaacaagtgaaacaagaattggcaagaaaataacacttgcttggtagggtgaagataagagagcatccctgactgtatacactggattcgatgatgacatagatggatcaaggttaaccgcctgtccatttccttctactaaggcatttatcacctggatattttgaattgtaaaaaatatgctgactcccaaaataagaaaaaaagtgaatttaaaagtaggtaaactacaatatttatagagatcactaaaaaaggaacgcttcaacatattattcaccttctttcccttcgagtgccttaaaatatgcttcctcaaaagagccaaactgtttcaaaatatcttttgtagaagcatcaataacaattttgccattagaaataccaaccaaatgatctacagttaattctaactcactcatataatgacttgtcattaatacagttttaccttcattgacaaaagactgcaaaaaattacgtacccagcgaattccttctggatctagtccattgattggttcatctaaaattaagatgtcaggatttgctaataaggctgtcgctaaaccaagacgttgcttcattcctaatgaatagtcttttacttttttatttttagcttcacttaaccccaccaactctaaacattccttacacctatttctatcaaccccacaagccaagccaatccaccgaagatgttgaaatcctgttctggttgggtaaggttggcaactgtcaaggaacgatccaacaatacaaaaaggattatctcccaattgagagtatttttttccatcgatcaacgccattcccatttgactattttctaaaccaagtaaaattctgattaaagttgattttccagatccattcggtccaatcaatccagtaatttcacctttcttagctttgaaagacacgttttgaaggacaattttattattatattccttatgtagcttttgaattgttatcattcattctttttcctttctggcttttagtgaaattcaaccttcacttggagcaagtataacaggagaaaatcaggaaaatctcagaataattattttcttcatttctaacaaattgcattctatatttgctataatatgctcatataattggaggaactatgaagtataaaattttagccattgacgatgatgaaaaaatcttacgattaatagggaatgcattagaagcaaacaactttcacgtcgaaactcgtaaaaatatagaggagatcaatatctgtgactttactggatttgatctaattttacttgacgtcatgatgcctatttctggtttagaaatttgtcgttccattcgtccacaaattactactccaatcttatttctaaccgctaaagattttgaagaagatttactaaaaggaatacaagccggggcagatgattacatcacaaaaccattcagcataaaagaattgattgcaagaattcaaatgcatcttcgtagggaagaaagatctcacactgactctaaagaagaaatgaattctgatataactttttatcgagatcgtcaagaagtttattatcaatcaaagagaatttcattaactaagcgagagtttgatttgctttatcttctagctaaaaatgagaaccgaatatttagcacagaagaactttacaattacctttatcctgtaagctctgacgctcaactaaggtcaatcactgaatacatctatcaaatcagacaaaaatttaaggctcatcaaattgatccaatcaaaacggtttggggaggaggatacaagtggcaaaggaaatgacaatcaaacaactcattcagaatacctaccttaaaatcatttggcaatttcttctatgtctgatacttttttacgtagttccagctcttctatcttctgtatctggaattaatgagaaaaatgccaatcgctttgctttattttttagcgtcagttcttggatttatctttgcatcattttaattgttatcattgtaacaaatattcgacaattattaaccaagattcaaaaagaaatgaacatggtttatcatagtggtctatatttcaccaaaaatgaacatcaccatttgcagattaaagaattcattgaaacaaacgatctgatcgaaaaaatgcaatctgaaataaaaaatagaattcaaaatgaaaaagatcaaaaaaaagaactcatgtttcaagtatctagcgctgcacatgatcttcgtagccctctaactgtcatcagaggaaatgctgaattcctacaatctaccaagcaaacacctcaaacagtggaatgtctaaaagatcttgagcaagcaagtattcaattaaacgattatttcaaccacttcatccaatactccaaaaccttttacgaccatgatattcaacttgaaaatatatcgattcaacaagtaactcatcaattgaaggaatatatcacacctttactcccgggaaatacacattttgtttttaataacacagtaacttcatcggcacaaattgctattcattccaatttattttttcgagcaatcacaaatgttattaataatgcaatacaacatcaaaaagataatgatgcaaagatccagctaacaatgtcacaagaaaataatcgattagttctaaccatatggaataatcaatctactttttcaaaaaatatattacagaatgctggaaatcttttctataaagatgaccaagcaagaacatcctctcaagaaagtcactatggacttggtttatctttcgtaaaacgcgtcatgaaacttcataatggaacgatgcatttagaaaatattcatgatggtgcacaagtcaagctaatcattcccattattatatagaaaaagccgaactcatcaatatgtgttcgactcagaatacagacaaacgtcatttttggtgtttgtctttttcatatatgactttcagacattacacagaagttagtcattaaactctttctttcctctcccctaaacgataaacaatcacgacggatactagaagaaccagagttgtgatgatcgatccttccgctccaaattcccctccagtcaaccagtcaggtcctgaccccatggtaaaggtaaagatagaggcatctgcccccgtcccactgacttgaaaaccaaggagattgccttgtacatagttccaggtgccgtgttgggcgaccactagccaaatactatccgtatagataaaaagcagagcagccagcactccatcgaggatgatattcagaacggataagaaggtcactcctgcatttcccagatgaagaatgccaaagagactactagaaatcccgattgctaagggaagattggttcttgcagcaatccgagtcaggagccaaccccgcgtcgctacttcttctgtcccaccttgaaggagccaaaatgggaataaacctagaataaagaggatgggttctaaacttaattcattcagctcaaaagacccaattccacttacttggtagacaagggcaatcacacccatttgaagcagtgaaattaagattccccaacctagatactttagccagttcttttttacaaaacctaaagtcgataaaggattcttctcaatgaacttcacccaaaaaataaagagtaagagaataaatacaaaactgaagagctcataatagagaatataatggtagaaaaactcttgaatacttgcaaccccatttcctggtgaaaagaactcggttagataacctattgcagtggaaaatggtcccaccaattcactactgagccatagtcctccttctataaagaaggaagctaaaaacacgtagaatagtgtacaaacgaaaactggcacagaagctttcgttttgataccttgaatgatcatccctttcttcatctaataacctccatttatctgataggtccattgtagcaaagaaaatccagacctgcaacaccacttcatgtcagaaaacctaacatcgaaagttgatttttcttgctgaactgatacttttctgatataatagcttttatagaaaaacataagatcattcatactctatttggtatgaatgttttgttttttcaggccatcctttggccaatgcactcatgggtcaaacacccaaagagaaatgaagaaaaaggagacagaaatgaagaaaaaattactagcctatttgcttttcttatttccactggtagcattcgctggtcatgctcatgctgagacgatcaaggtcgttttcgacacagcttatgctccgtttgaatttaaagattcagatcaaacctataaaggaattgacgtagaaatcttggacaaggtcgctgaaatcaatggctgggatttagataaatccttccctggatttgatgcagcagttaatgctgtccaagctggtcaagcggatgccattatggccggaatgaccaaaacaactgaacgtgaaaaagtcttcaccatgtctgatacttactacgatacaaaggttgtcattgcaactacaaaagccgacaaaatcacgaagtacagccaattgaaagggaagaccgtcggtgtcaaaaacggtactgcagcccaacgcttcctcgataaaaacaaggacaaatacggctacaagatcaagacttttgatacgggtgatctcatgtacaacagtttatcaactggtgcagtggatgcagtcatggatgatcaacccgtcattcaatatgccatccaaaagggtcaggacctagcgataaatatggacggggaagcagtcggtggctttgcctttggtgttaaaaaaggtggaaatcatgaaaagttgatcactgaatttaacaaggccctcgctcaaatgaaagctgatggaacacttgatgagatcatcaagaaatggaccggtgaaagccaatcaactgctaacagtgctgttccaacaacaactactcctgctggacaaaaagcaacgcctaaaaagtcaaaatatgtaatttcaagtgactcatcttttgcaccattcgttttccagaatgggaaaaataagtatacagggatcgatatggacttgatcaaggccattgccaaagaccaaggatttaccattgaaattgataaccctggatttgacgctgcggtaagtgatgtccaatctggtcatgcgcaaggaatgatcgcagggatgaccgtgaccgatgctcggaaagaaacatttgatttttctgaaccatattatactgctaaatctattcttgcagtccaagaagatagtaagattgattcttacgatgacttaaaaggtaagacggtcggtgttaaaaacggaactgcatcgcagaccttccttgaaaagaataaaaataaatatggctacaagatcaaaactttctctgacggggcttctatgtacgacagcttgaactcaggttctgtcgctgcgattatggatgacgaacccgtcatcaaatacgctattaaacaaggacgtaaattcaaaacacctatcgaaggaactccaagtggtcaactagcatttgccgttaaaaaaggtgaaaatcctgaattgatcgagatgttcaataacggtcttgcaaacttaaagaaaaatggccaataccaaaagattctcgataaatatcttaagtcagatagcaaatcaagtacttcaagtacaacagcagatgaaacaacgatctggggcttacttcaaaacaactacaaacaattgttaagtggtttgggtgtaacccttgcccttgcacttctctctttcgcgattgctatggtgatcggtgttatctttgggatgtttagtgttagcccttataagtggctccgctggacagcagaaatctttgtcgatgttattcgtgggatcccactcatgatcctcgctgccttcatcttctggggaattccaaacttgattgaatcggtcacaggtcatcaatccccaatcaacgactttgtcgcaggtaccatcgccctctctctcaatgctgctgcctatatcgcagaaattgttcgtggggggatccaagctgtaccgattggacagatggaagccagccgaagccttgggatctcttatggcaagaccatgcgcaagatcatcttgccacaagcaaccaaactcatgcttccaaactttgttaaccaattcgtcattgccctgaaagatacgactattgtgtctgcaatcggattggtagaactcttccaaactggtaagatcatcattgctcgaaactaccaaagtttcaagatgtatgctatccttgccgtcttctacctcgtgattatcaccttgctaacacgatttgcaaaaaaattagaaaagaaggttaactaatggctaaattaaaaattgatgtccatgacctccacaaatactatggtgaaaatgaggtcttaaaaggaatctcaacgaaattctacgaaggggatgtggtctgtattatcggaccgtccggttctggtaaatctactttccttcggagtctcaatctcctcgaagaagttacaaaaggtcaaattaccgtaaatggatatgatctaaccgatccaaaaaccaatgttgatttggtccgtgaaaatattgggatggttttccaacacttcaacctcttccctcacatgagcgtcctagaaaacattatgtttgcgccaatagagcacaaactgatgactcgcgaagaagctcaaaaagtcgggatggaattattagaaaaagttggtctcgcagataaagccgatgccaatccaaacagcctttccggtggtcaaaaacaacgtgtggccattgcccgtggactcgccatgaatccagatattatgctctttgacgaaccgacttctgcccttgaccctgagatggttggagatgtattgaacgttatgaaggacttggccaagcaagggatgaccatgattatcgtcacccacgagatgggatttgcccgccaagtggctaaccgcgtcatcttcaccgcagatggtgaattcctcgaagacggcaaaccagaccaaattttcgataacccccaacacccacgtttgaaagaattcttggataaggttttaaacgtttaattgagataaaaacgagtggttcctgaagcatctagcaaaattgctagatgctttttttagactaaaaaagcattttcaaacctgaaaatgcttagaatgtggactaactattttaaaataaaataagtaaaacgtttctaaaaggaacaacaatgattttcaatttttaaaatgaatcaagaaaatattgaaactttccgctgtgagaaaagtgctagaaacaaatcagtttctagcactcgggagttttgaaactttaggttcaaaactaagtcatggaacttcgtagaagttcgctgacttccgtactcacctaaggaaagttttgaatatgtctttatcttcaatctaagcattttcaaatctgaaaatgcttttcatgttaacgaatctgttgctgagctgtttgcatcttgtagtaaacaccttgtgcttgcattagctcttcatgagtgccatgctcgacaatatcgccatccaccatgacaaggatcatatcggcattttgaatggtcgataagcggtgggcgatgataaagctggtccgtcccttcatgagttgatgaaaggcatcttgaatcaaggcctcagtccgagtatcaatggacgatgtcgcttcatccaagatcaaaatcttaggaacggaaaggaaaacacgcgcaatcgttaagagctgacgttgtccttgagacaaagactctccagcatctgaaagataagtatcatacccttgtggcaactgcctgataaagaaatccgcattggccgctttggctgcttctatcacttcttctctggtcgcatctggacgagaaaaagcgatattttcatgaatcgtcccgaccttgagccaggtttcttgtagaaccataccaaactgttggcggtaggaagcacgggtgtagtccgtaatcggcaccccatcaatcgtaatcatcccagagttcacagggtagaaacgcatgagtagattgatcaaggtcgacttccctgctcctgtaggccctacaatcgctaccttactagcggctggaacctgaatggttaaatctttgatcaaggtcctccctaaatcatagccaaatgcgacgtgctcaaaacctatcgctcctttgacatcctgagtttctataacacgatgtcccgtctcttcgatctcaacttgatccaatacgctgtacaggcgctctgcgcaggcaagagcactttggagttctgacaagacagaagaaatatcattaaagggtttggtgtattggttgacataattgaggaaggtcactaattgaccgacagtaaagtgagatcccgaaataatccgtacggctccaaatccagccactaccgcataaatcaaggcattcacaaagcgagttgcaggattgaccgttgaagaataaaagacagcaaattgggaatacttggcatagctttcattcgttcctttaaaagccttacggaattgatcctgagcgttaaaggactggattaaactttcctgggtcaaagactcttcgatcaactgagtttgcaggccacgcgccttggtttgtgcttggaaaagcgtataggagcgcttggcaatgaaacgagcaatcaagagagacaatggggtcaataccagaactgctaccatcataaagaaatctaatcctgccatggtcacgatggtgacaagaatggttaagaggcccacaaagaactggttaaagaccatgagaagaccgctattaagttgctctacatcggttgttaaacgactgacgaaatccccacttccttgcttgtccagataagacaagggcaagcgatgcactttttccattactttttctcttagggtttggctaaaccgataaaccaattgattgtagagaagaggattaatccattggatcaaggtattggccacaatgattagaagcatctggatcaaaacgggccataagactttcatcccttgaggattcatgaccaagtcaaccgcatgtccgatcaggatcggtaaccaaaccgttaagccaacttgaacgatagttccaatactggctagaatcaggagaccgggatggtgagcaaaatctctaaagagacgttttaaataactggaacgtttttgactcatgcttcctcccttccgtgttgtgaatcatgaatttcttgataaatctcattcgtggacaagaggaaatcatgatttcccagtcctacttgatgccccttattcaagaccaaaatctgatcagccgacttgagactattggttcgttgagatactaagatcaaacttgtgtcactcaattcttctttaatcgattttaagagacgagcctccgtcaaataatccaaggcagaagtcgaatcatccaaaaccaagaaaggggcctttttcaaaagagcacgcgcaatggtcaaccgctggcgttggccacctgaaaaatttcgaccaaaggcttctaccggctcatccagctttccttctttttcacggacaaaatcagccgcctgagccgtttctagcgcccaccacaaatcatgatccgtcagactttcatccatccctaataagagattcgagcggatagttcctctaaagagctctgccttctgtgggactacagctatccactcccgccattccttgagagttctaggagagtgaccttgatgatagagggctaattttccctgactaacagcatacaaatgactcaataactgaacaagggtggacttcccagatcctgtaccaccgataattcccagcatctgtccttggtcaagatcaaaggaaattccctctagggctgggcttgaagccgttggataggtgaaagaaacttcctctgcactgatcgcttcttgctctcttgcagtttcttctggcagagcttctaagaggtcttcttccttcaaatcaaaaatctcttgaacacgcttagctgaaatatagctgacatttaaagacgtgaccagcatcgccagtttgatcaattctgttaaaatttgtaataaataattgaccaaagcgaccaacatcccttgggttaaaagaccagcagagatattcaattgtccttgccaaatgacacaaaccaaggtcgtattgaccacaaggaaggtcaagggactgaccaaactagaccagataccagcgcgaatttgccagatcttgtagtcctgattgacctctctaaagtcctctaattcactagactgttgtccaaaggcccgaatcacccgcatcccttgaaattgctgacgcgtcactgtgaccattcggtctgtgattttccggatcttggcaaaaagaggattgacaatccgagacatgatcacaataatcaaggttaaaatcgccaccatccccaagaaccaaagggttagtttaggactgatggtgaaagccatgatgatagaaccaaagacaataatcggtgctctcaaaaagaggcgcaagaattggttgatcccaacctgaatttgataggtatcagaagtgagacgggttaccaaactagaagtcccgatcctatcgcgcttgtcctttggaagtgataagatcttctcatacaaatccttggtcatctcgcgggtaaagccgacagctgctttagaagaaaaatactgggccgtaatagctacgacgacaccaaagctcgcaaataaaaacaaaacaccgaccgtcatcaccactgcgctcgtttcctttttcggaatgacctgatcgactaagtgggcgatgattaaggggacacacaattcaaaaatagcttctaaaagcttaaacacgggccctagaaaagtttcccatagatagcccttaaaatacttcaataaagatttcatactactcgattctaattgtaagagatgtacctattttatcacaatttttaaagataaaaaaactctccctgcaaagcagagagagttcgttcggtttttcttgaccagcttattcagcatgctcttgtttcatttgcacttgtttagacgaatgaaggccaggaatgttattccatctttgtccccttatttaagatcttgcccattttcctcaatccaatcagtaagagtgggaaagaaaggagtgttatcaggcctagcacaagaaaaacaactacaaatccacaagtatcgatcaaccaaccagtaagtgggaagatcacaatcatggaaagactaaacatcatggaattgatactcagcatggttgctcgtacactagaaggtaaataagcttgtagctcattgtagtaaatgggttgataaactgcgtatagtgcattggtcaaaagatagacactcagataggcaaatggagtcttgaaagctaccaaaagcaaggccaaacctgtcaacgcaaccagaattggaaagacttgattactattccattttttcccgatttgactggccagataaaccgctaggagattgaatccactgccaatcaacataatgagcgaaacttgccaactggctaagtcactgattttctgttggtagtaaaaataaaacatacacatgatggttcctagcagctgataggtgagcatccagtaaaataagactggtttttcctgccattcttgtttcactacctccaatatccgctttaaggtcaaatgatttctttcatcactcttgctctctggctccttcattagaaagatcaaaagaatggaaagcaaggaaagcccaatagcaatataataggtccaagccaatgctccgtgaataaagaagcctgccaccactgtacctaaagttcgggtgacttcggccacaccagataagaagctagaaatctgaagataacggtctttttgacctgcttccacagctgaatcaaataagaaagctgtactggtccccgagtcaaaattataagaccaagcattgaccatcatagcaatggcatagatccaaaaattcccctgaccaaataaaatcaagatcgaggatccaatattgcacaagcgagccaaataaagattggtcttgtagctaaagcgatcggccaacataccagatgggatctcacataagagactggtcccatgaaagatactttctagtaaaccgatttgaagcaaggaaagaccattttgaataaaaaagagaatccaaaaactggtgattccaaaataagatgtaaattccagacctgctaggagtgaaatattgcgtttgtaagttcttttaaacattgtttttcctctttcaatagattatatgagtgtttctaaaagacttacttatatttgcctacattttctccacctccttcattctttcttgattcagttcttgacgcaattgggtcacttgattagacaaggacaccaacaattcggtttgcaacttttgaatttccagtaaatccgtctggtcttgctgcaccatatgatcaatcttcgtgtgaagcaagcgaatttcccgttcagactccatattaacgttaaagtcatttcgcgcttgcaggcgatcataatctgctgccctgttttggctcatcatgatcaaaggagcttgaatcgccgcaatagtagaaagtgcaagattgagcaagatgaaaggataaggatcaaaatcccagccaaagggatgcaagacattgatcaacatccagatagccatcatcatgatgaagctaataataaaggtccaagaaccaccgaagcgcgcaaccgaatccgccacccgctggccaaaagtatagctggctgtcaagcggtcttcaacgttaaagggacgttcgctttcaggcatgacacctgtcacctgctgtttaatggcttcgtttttatcattggcacgctcaataatctgacctagataatccatacaatattggctcaaatttttataggtgataaaatcatccatttgactttccgggtaggaggtcttgagcatctgttgaatgctatggtctagatctgcgatcaaagacccctgaccatcctcgtattctttcccatcgatgatatctattttcagcattgagtttcctttcatagtttttggagcagataaaagtgaaaaacgcctaatggcgtttttacgtctattaaggtttgatacgatgcaacatacgtgggaatggaatggcttcacggatgtgtttagtaccagctgcgaaggttaccatacgctcgataccgataccaaatccaccgtgtggaactgtaccgtatttacgaagatcaaggtagaattcatactctgtacgatccatgccaagttcatccatttttgcaacaagggcatcgtagtcttcctcacgcatagagccaccgatgatttctccatagccttctggagcaagcaagtctgcacaaagcacgcgctctggatttccaggaactggtttcatgtagaaggccttgatagctgctgggtagttcatgacaaatgttggcacaccaaagtggtttgaaatccaagtttcatgtggtgagccgaagtcatcaccatgttccaaatgctcgtaatctgcatcttcatcgttttcatgctcttgcaagagatcaatggcttcatcgtaagtgatccgtttgaatggctccgcaatatagcgtttcaagagctctgtatcacgttccaaggtttccaaggcttgaggtgcacggtccaaaacaccttgtagaagagctttcacataagcttcttgcaagtcaagtgactcatcgtgtgtcaagtatgagtactcagcatccatcatccagaactcagtcaagtgacgacgagtttttgatttttcagcacggaatactggaccaaagtcaaagacgcgaccaagggccatagcaccagcttcaaggtaaagctgacctgattgactcaagtaggccggtgttccgaagtagtctgtttcgaaaagttctgtagaatcttcagcagcatttcctgaaagaataggactatcaaacttcatgaagccattcttatcaaagaactcataagttgcatagataatggcattacggatttgcatgacagcgacttgtttgcgtgaacgcaaccacaagtgacggttgtccatcaagaagtctgttccgtgttcttttggagtgattgggtaatcttgagattcaccaatgacttcgatgtctgtaatatccaactcgtaaccaaatttagaacgctcgtcttctttgacaatcccagtcacaaacactgatgtttcttggctcaagcgtttgatggtgtcaaatttttcaagccccacttcttcgccgaatttttcgataaagtttggtttaaaagctacaccttggaaaaaggcagtcccgtcacgcaattgcaagaaagcaatttttcctttacctgatttgttggccacccaagcaccgatggtcacttcttgaccaacatagtcttttacttcgatgatagtaatccgttttgtcatcattcatcttccttttctcgttaaacttgtccgaagacattatcttcttaattgtatcataaaaaggctttcagtgctaggctctacctgtgaaaaccagattttttttaaagaaaaagatcctcagctcattactaaggatcttgcatttttatttttccataaaggccttgagtcggagaacagcttctttcagggtatccaaatctgtcgcataagacaagcgaacattttcaggggcaccaaagccagctcccgttactaaagcaacctctgcttcttctaaaattgctgtggtaaattccgtcacatccgtatagcccttcatctccatggccttcttgacatttgggaagagatagaaggctccttgaggtttgatggcttcaaaaccaggtacttcattcaacaaaggataaatagtattcaagcgttcctcaaaagcttgacgcatgatctcaatagaagattggtctcctgtgagggcttcgattgcggcatattgggaaacggttgttaagttggatgttgtttggctgatcaccttggccatggctccaataatctctggatcacccactgcaaaaccaacccgccaaccagtcatagcataggttttagaaactccattaatcacgatggtttgcttgcgaatcgcttctgataagctagaaatgggcgtaaaggtgttgccattgtagaccaatcgaccatagatatcgtctgccaaaatcaagatgtcatgctcgacagcccaatttccgattgcttcgagttcttctttactgtagatcattcctgttggattggatggcgaattcagcaagacaaccttggtcttgtctgtccgtgctgcttccagttgctctaccgttgccttgaagtgattttcttctgttgtttggaaagtaacaggtgtgccttctaccatcttgacctggtctacataagaaacccagcaaggggttggaatgatgacttcatcacctggattgatgacagaagtaaagaaggcatagaggataaacttggcaccagtaccgaccacaacctcatttcggttcactgcatagccataaaactctttcatatagtcgctaatggcatccttcaattctggaagtccagatgcgaccgtataaaagctggcacgaccatcctcaatggatgcgactgctgcttcttgaatatttttgggagtcgcaaagtcaggttgacccagggtcaaacttaagatatcacgaccttctgccgccaaagctttggcacgcgcatttgcagccaaggtcacactttcttccatttccaatacacgatttgataatttcatatttcctcctcaaatcctaaaaaacaccggtgacttttccagtcttaaaatccaccacataataggagctcccggccttgacttcccagatcggtttgcctttaaagcgtccaaaagttacccgatcaatcgcgtcctgactcttctctttgacgacagaagctgcctctttggagctaactccttctttcaaagggtaggtatagactgcatcatccgcctgcgccaccaaaaccgctagtccttgcccctcttggtcctttccaataaaggaaagatacgcttctttgccatgaaagaaactctccgtctcaatggtagcaatcgaagagtgagacagagctatttttcttgcttgcgccatttgatcctgcatgtgatcagaagttttttcagcaagaaatagccaagaaaaaaggatcgtcaatactaagatacagattcctattatatgttgccatattataaaaagattatttttctgtttcactccctcattatacaccaaagccacctagaattctatagattttcaagaaagaattgttactaatatttcatacctgttacaatgttttagtataaaattgtttgataaacaaagtaaaattaacatctatgctatcatttgttgatagtttaataactttgtcacaattttgtaactaatttgaaaataaaattaaacgacagaaatactatttattgataaaatatagatatggaaaatttaaagagattattcaaagaagcaaacgtagatttaaaaaccatgatcgtcttccacaaggcagaacgattgatccgtgcgtctgaggctcatatctttaaaaagcaccagttgacaccaactcaattctctgtacttgagaccttgtacagcaagggcgatctccgcattcaagatctgattgatagcattcttgcgacctctggaaatatgactgtggttattcgcaatatggtccgcgatggttggattacacgcgaaaccgatccagaagaccgccgtgcttatcttgtttctattacagatgccggtcgtaaaaagatcgaagaagctcttccagatcatataaaaaatattcaacgcttgatgcaagtctttaatagtggcgagcaagctgagttgacagaactcttgaagaaattcaaacatatcgcctaagcctactgctcaagacgattctgactccaaaatcctctattttggagttttcatcgtgcattctctttatctaacagatcaaaaaaatattcctgacgcttctcaggaatatttttttttattctttcacaaagatccattctttctcttgcgataaatcctcacgataaaagaaacctgctacttctaatgatttcagatcttctagatgggtgatttcttccttcatcatagctgtcaccatggcaccacgtgctttctttgaaatcgtcgagtgaatttttagtgtcccaccacgattctccatgaatttgatccgaatcattcgctcacgaatggcttttgaaaagacctgttcaaactcagaagacaaaagagataagatctgctcctcaccttctactgcctgatcatagtcctctttccagagtacctttagagattttccagctggttttagcttcatcataaaatccaatcgatggggagcaatcccttgataggcaggtagtacaccgtataaagcagtcgtgatcaacaaatgctcctgcagataagcctgctctttttcggataagtcttgacgctcgatactacgatacataaggccatcaaacagttccaaagcaggataggttttagcactcccagctaacaaagcctcaattctttctttttctgcttgagctctttcctctgagatcccgtaaaaggtcgctaattcctctagggagaatgccttcaaagctcggaggatggtttttgtgttctctgacaagggttggggctcgacgatacgagcctgttcgttcagttctttagcggatggaattaatagtttcataggtctattgtaccatatttttcaaattttcttgacaatagtttttattaatgttattatctagttatgaaaactagatgaaagaaaggtgaagatttcgtgtccactttttcctatccaacgtgggagcaactgcctgagctagacctctatcttgatcaggtcctgctttatgtcaataaaacctgtgcacctgttctctcttcttcagacaagggcttgacggctgccatgatcaacaattacgtaaaacatggttatgtcgaaaaaccagataagaagaaataccagcgtggacaggtggctcgcttgatcgctattacaaccttaaaaacggtcttttctattcaggagatcgcttctaccttaaatttcttgcaggaccaggcaagctcagatcttctctataatagctttgtcgcttatctcaatgagcataaagagccgatcgctcctatcattcgctctgcctgtcagacagttcaactttatcttgaaaccctgacttatattcaaccagaaaaaacggaggaagaaactgatgaattacaccatgaaactaagtaaaaaattatcctttggagaagagatcgctaatagcgtaacccacgctgttggcgcgctcctcatgttgatcttgcttccgatctcagcagtctatagctttgagcaacacggtcttctcagtgcttttgggacttctatctttgtgatcagtctctttttgatgtttctgtcttcgaccgtctaccatgctatgtcttacgattcacctcaaaagtatgtgcttcgtattatcgatcattccatgatctacattgcgatcgcaggtagttacacaccggttgtcctcaccttgatgaacaactggatgggctacagcattatcttgatccaatgggggaccaccatctttggtattctctacaaaatctttgccaaaaaagtcaatgaaaagttcagtctcgctctttacttgatcatgggctggttggtcatctttattattccccaaatcgttagccaaaccaatccgatcttctggggtctcatgcttatgggcggcctgtgctacacggttggagctggcttttatgctaagaaaaaaccatatttccacatgatttggcacctcttcatcctagcagcttctgctcttcagtatttagccatcgtttactttatgtaatacgcgcaccactcttatgagtggtttttttgtgattttttctgtacaatagtaaaaaactgtatggggacagtcggaatgaagacgagcaaataccaacaaattatcgatttcttaaaagaagctattcaagatggagaactggaaactggacaaaaaattccttctgttcgccagttagctagtcaattttcttgtagtaaggacacggtgcaacgggccttgctggacttgacttaccagcacttcctctatgctaagcctcagagtggctactatgttttggagcaagaacctgatcgacatgaggatcttccactaaaattagagaaagaccgcaaccaggctttcgaggacttccgaacctgtatcaatgaaaccttgattggtcgggagaattatctcttcaacaacttttcggatcaagcaggcttactcgaagtacgccaatccattcaaggcttattgaaggaagaaggtatttatacgacttcagatcagattgttttgactgctggtactcagcaggcgctcaatatcctcagccagattgacttccccaataaaaagtcgcagatcttgatcgagcaaccgacttatcatcggatgaaccaactcttagattcgcagcaacttgcctaccgtaccattcaacgtaatttaacggggattgaccttgaggatcttgaagagatttttaaaagtggccatatcaaattcttctacacgatccctcgttttcactatccgcttggtcatagctattcgaccaagcagaaagaagcgatcttgcaacttgctgaccaatatgatgtctaccttgttgaggacgactatttgggagatcttgatagcagcaatgctccatcttttcattatttggatcaaaaggaccgagtcatctatatcaaatctttttcgaccaatctcttttctgctcttcgcatcacttccatgattcttccccaagaccttctaaagccagtcttgacctataagacgattctggactatgatagcaatctgatcatgcaaaaggccttgagtctctacattgataacggtatgtatctgaccaataaaaaaagactcctagccagaaaaaaagaggaagaagaaagattgaagaccttgatggatcagtcttctcttctccctcatctgaccctgacccacgatgggatcctactagatcttcatcaggtcaaatctcttgccgccttaaaacacagtggtctcccgcttgatttctttgaagcagcctacatcacttcttgtccttatcaactcgccaagatcaaatcggcagatgtggccaatgttttaccaaagctgacgactttttttgacttgaatgtcgagaattgttcatatatatagatcaaataggttttctttaattcttattagttagaataattcaatattatctgaaacattccgccgtgaaaaaagtgcctgaaacttaatggtttcaggcactcggaattattgagacctcaggctcaataattagtcatggaacttcgtagaagttcgctgacgtccgcattcacctaaggaaagtttcttagaaaatatttttccaatctgaaagctcgtttagttaaatactagacgagctttttatctatttcttcaattgctcataaagaagtttggcattttgaaggccgatccgataatcgaggcgaattaggcgaatcgcttccatctctggttctttgaggtacttctctctttgttccttggagatgctacctggttttagaagatagtgagtgaattgatttctgactttattgagctcaacttgaagggtgaaatagagtccaaataagacaatcacaactcccatcaggatcagatcgtttgacatggtgtatactccttttttctgttattttctttattttacagctttcaagaaagaaaaacaagagagtgggacagaaatcggtaattcgttagaattcgatttcgtcgtcccacctccgcacagttgagtagggctgtaaaaactgataaaatcagcgtagtagagcccactcagccactgcgtcttgctcgacaatccaaaaacaattgagaggctaggacttttgtcccagcctccttgttttccttatttcatcataccggcctggaggtcatacattttcttatacgttcctcctagagtaatgagttggtcgtggttgcctgattcgatgatttttcctttatccagaacatagatgcaatcggcatcttggatggtagaaaggcgatgggcaatggcaatggttgtccgcccttggcgcatcttcttcagagagttttgaatcatctcttccgtctcttgatcgatattggcagtggcctcatccaaaatgaggatcttaggctgggcagcaatggtccgggcaaaagccagaagctgacgctgaccagtcgataaggtagaaccccgctctgttacaggatgatcatagccaccaggtagactctcaataaagtctgccacatccacaaatgcagctgcttgtcggatttcctcatctgtcagttcttcatggtacatccggatattagaagcaatggttccatgatagaggaagggttcctgcaacactagaccaatggacttgcgcaaggcttcctggctgtagtccttgatattctgtccatcaatcaagatctggccacgatcaaattcataaaagcgcatgaagagattgataatagaggatttaccagacccagtatgaccaacaaaagcgatggtttgtccatttttgacatcaaaggagatatcttttaggacatcccgtttgccatcataagaaaaagatacatgctcaaaacgaatatctccccgatcgatttctttcaggctaccagcttgcttgggctcgtagtcgtctcgatccatcatctcaaagacacgaccagcagaaatggttgaggtctgcaaggttgcaaaattttgagtgacatcaatcaagggctggaaaagctgactaacatactggataaaggcatagataagtcctgctgtaaagccagtggactgccaatttaggccgaaaaaggttagaataaccgcataagccagaacctgtaacagggtcatagctggcctcaaaaagagggaattgacatccacagatcggttggcgtaatccaaatgttccccattaatctgttcgaattcatccgtcaagcgctttccttgacgaaaggcctggacgatccgcattccttcaatggattccgataatttcacattgatatctgataatttttgtcgggtcatcttgaccaagcgattggataacttgcgatagagacggatggaaaaccaaatgatgggaagaaaaggcaggatccaaatggtcaaatgccagtccaagctaaacatggttactagagtgactaaaaagagtaaaaaggatgaaaccaggcttgaaaagaccgtagaaaacatatctgcgactgcctgtgtatcattggtcacacgcgaaacaatcgaacctgctgctgtctggtcataaaaggacatgcccagtctttgaagatttttgaaaatatctagacggatatctcttacgatggaattggatacacgtgcaaaggttaactggctcaggtaagttgccagcacacgcccaatgaataacccatagtagagaatcaaaaactgaaaagctgtcagaactggtgagcctgtttctgttggatccacgaggtggtcaatataccagcgtgctgcaagagggatcgccgtcaataacagactagtcaggaaggtaaaggctaaggctagggccgttaaccatttataacgccacatataagtcaagagccgcttcatcacatgagcttcagatgttttcattcagctttccctccatttcttctgataattgttgggcttggtaggtttcatagtaccaacctttttgagccattaattcctcgtgatttcctcgctccttgatctgtccattctccattaccagaatcaaatccgcatgaacgatcgctgataggcgatgggctgtgatgatcgttgttttccccttgcgttcctgcttcatattttcaatgatttggtgctccgttttagcatctactgcagacaaggaatcatccaagatcaagatctcaggattcatgaccaaagcacgactcatggcaatccgttgcttttgtccgccagaaagagagacccctctctctcccagcactgtctccatctggtctggcatggccagaatatcttcatagactccacaagttctcagagccttcatcacctcttcttccttgatctgtggatctgaaaaagcgacattctcgcgaatggtcatggcaaagaggatctgatcttgagggacatagccgatcaagcttcgaagatcttctaaacgatagtctttgatagagattccattgagcaagatatctccctgctccaagtcgtgctctctaagcaagagacgcaacaaggtggtctttccagatccagttggaccaacaatcccaagggtttgccctttttctaaatgaaaggctacctttttaaggacaggctctttctcataggcgaattctttaatgtcatattccagatcgccgttttggatgtctgtgactggttgacttggatcttggatatcaggtatttctgctaaaagtgtctcaatccgatcataagagacgctagcccgctgactaatattaaacaagaagcccatggcttgaaggggccagacgagcatattgagataggtaataaaggttacgatttgtccaaccgtcaggctcccttcctgaacaaatacccccccgaagtagagcgtcaagacataggagagaccgacaaaaagaagagtggtcggatcaaacaaagcattgtaaccggctgaagtcatattctttgaaaagaccatttgattggttttttcaaaagcctgaatctcatctgcctgaaagccaaaggatttggtcactttgactcctgatacggattcctggacaaagttgttcagctctgagaagccttcttgggcctctttgaaggctttgtggtttttgcgtccaatggcggaagtcactaccaccataaccggtagaggcaaaatagccaagagggttaagcgccaatcaatcatgaaaaacatgctgactaaggtcaccaaggctgtcacggaagcatccactgcagacataaccccgccaccagcaaacatggttaccgcattgatatcattagtagcatgggccatgagatcccctgtccgataacgctgataaaaagacggagacatgagcgtaaattgctgaaacaaacggtaacgcaagattcgagccaacttattagccgttccaaaaatatagcgtctccagacaaaacgaaggccatacatggctagagctgcgaggaccaaaagggcaatatccataactaactgccccagtgtcagctttcttttatcgatcaaatcgatcacaaggcccatgattcttggaggaatgagatttaaaaagctaaccaagatcaaggcccctatcccgatcaagtatcgcttcttctctaaattaaaaaaccaagataatttcctcaacagattcatcttatttccccttttttgtgagttgccaactactatccactagagcaaacaactcctcatcagcaattgttccatctaaggggatactcacccaatattttttattcatatgaaaagctggataaatccccttctgctggatgaaacgggctacttgatcagacttaacattcaaaacttctattttcccagacttgccagcatctagttttttccaatcaatggtcataaagacaccataccacttgagggtgtctcggtggcgaatggcaccagattctggagatctctcccacaaatactcaatcgttccctgatagtacagagagatataggccatgagacgcttggcttgaggatagagaaatttctctacctcaaaacaagcttggcgaatccttgcaagactttcctgacaagcttctctgacttggccaacgaaatttccttgtagctgttcctgatggatctggatatactcgtcccctgtatcctgatcatagacctgaaaagatatcttctggtcgcagacacggacctttaagagaaaagagtccgataagactgggcactggtactcatagcctgtcccactcttttcaaatccataagccaatcccttttctggctgaaaggtgtatcggtcaaaataatgctctaaaaacattttctctcccttattcatttttgcactagaagaggctggaaacaacgtccccaaccttgataacggatcttcaaaactacttcaagcagtgagcgtttcttctttaaaacacgatgcgcgtgccatgcagttgacaaacacccaattgctccaaaaagagctgacgattgtcaagggtcacacccccacctggcaggatctgaatctttcccttagccgcagctaataaacgatgatagtgggcaaaacgttgctcgagtgtggcacctggatttccacctcgtgttaaaatgcgggccacaccctgatcagaaagccactcaatcgcttctagctgatctgtatgagctaactcatcaaaggccatatgaaagaccacctctgcctctccacaggctgctagtaaaagctgcatgaccttctggtccaactttcgatcgctcgtcagcgcacccagaacaaaacaagtaacccctatttctttcgcagcacgaatatccgtcagcatagcttcgacttccagatcagtgtagacaaaatctccaccacggggccgaatgatcacacatagatccacagacttcgctcttgtcagtttgattgcttcattgaccacacctatactcggtgtggtcccgcctactgccaggttgtcgcacagttcaatgcgacctgccccagcagcaatcgccttatcaatataagttaaattctctgcacaaaattcaaagacaagcatgacaactccaattacaaagacttaaaacaaggatatactaacagttaccttagcattgccattttccactctcgcttttgagatactatagcctgcttgagggatctcaagggtgatttgatcaccattcactgtaaagccgcctccattttgattggattgatccttcaaatagttgagaaccaagaattttggaatgggcattttccctaatttagcaccggtaacggtcaaattcatgacattgttttcgacttgaccagtcatggttaaatctagatagctatcaactggccctaatgatacaggaactttgacgtgaaggtcattgccatccattcctagtgccatcttttgatagtcagaattgtcaagggcggatccagcacttgcttttacgacctgactcaattgcacagaattgagacttagctcagttgagagcccttcggtgctcacagaagcgtttgaaactgcatttttagccagctcaatcaaagaactccctgcctgcacatttctcagctgctccccttcaggaattgatccaggaaccaacaggatcactaataaaataaataaaacgatcaccatgccaatcaggcgtcttatccacttaaacatctgctcctccgatacatgaaaagttgtattcttattgtaccctaaatctaaagaaattgcgactaagaggggcctttacaaagcaaaagagagcgtgggacagaaatcggtaattcgttagaattcgatttcgtcgtcccacctccgcacagttgagtagggctgtaaaagctgatgaaatcagcgtagtagagcccactcaaccactgcgtcttactcgacaatccaaaaacaattgagaggctaggacttttgtcccaacctctctttgtgcattatttagatttaatgtagttaacaccatctgcttttggtgcgactgcttgtccgaagaaggctgccaagacaaccatggtcaagacgtaaggcgcaatttgcaagtagatggatgggatacctttaagcaaaggcaattgattcccgataacagccaaactttgcgaagctccaaagaagagactagccagcatggccccgattgggttccatttcccgaaaatcatagctgcgagggcaatgaacccaggaccaacaatagtagtcaccgcaaagttaacggaaatagattgagcgtatatggctcctccaataccagctagggcacctgagatcatcactcctaagtagcgcattttataaacattgattcccaatgtatctgctgcttgtgggtgttccccaactgaacgaagacgcaatccaaattttgtcttgaacatgataaaccaagcaaagaatgaaaagagaatcgcaacccagccgatgatgctggcattgttgaagaaaatatccccaatgaccggaattttagataagactggaattgacgttttcccgaaggcaactttgatattatcagtttgtcccttgttatacatcgctttaacaaggaagactgccaatggaggtgccatcaagttcaatactgtacctgagacgatatggtcagcacggaaatgaatggttgccaccgcgtgaatcaaggagaagagtactccaatccctgcagcaacgatcaaggacaaccatggtgtcaaacttcctaactcaggttcaaaagtcaagttaaagataatacctgagaaggctcccataaccatgattccttctagaccaacgttaacaaccccagcgtgttctgagtatgctcctccgatacttgtgaagatcagcggcgccgcatacacaatcatagaggaaacaagaatacttaaaatcgttacaatactcattagtttgctcctccttttttagctgaacgcatcgagatcatcttttcaataatgtagtgagcacatacgaagaagataatggatgctgtcacaatttgaacgacttcttcagggatggcagctggcttcataccaactcccccaatttgaagtgctccaaacaagaaggcagcaaatggaataccaattggtgaattcatcgcaagaagggcaacggccattccgttaaatccaacactcattgagctggtttgaacgtagacatttgagtaaatacctagaccttctgctaccccaccgataccagcaagagcaccagaaatgatcatagaaaggataatggtccgttttgcagacatcccagcatattctgccgcattcgcattgagaccaacggcacggatttcaaaaccaagtgttgttttcttcatcaagaaccagatgaccaccactgcgatgatggcaaaaaagatcccgatgttcatttgtgatttgtctgtcaaattacgcaaccactccgtttggtagacagcgttagctcccacatcaatggttgagtccttatttttcatcaaggaagctgggaagctatgaatcaaggcattcccaccatagagaacaatgtagttcatcataatggtgataatgacctcactggttccgagataggcacgaaggaaaccaggaatcgctccaataaatccacctgcgatagccgcaatcaaaacggtcatcggaatcatcagtaagcgaggcatatttgggaaggaaagggcaaaccaagtcgccatgatccatcctgcaaaagcctgaccaggaagtccaacgttaaagaagccggcccggctagctaccgaaaatccaagagcaactaaaatcagtggccccatagcacgggaaatattaccccaactcttaatcgaaccaaaggctttcttaaacagcaattcatatccccaaagggcatcatagctgaaggcccacataataatggcacctaagaccagtcctaaaaggacagacaccaatggaacagcaatttgttttaaattcttattcatttgatgctccctcctttacttgtcctcctgccatgaggattccaagttcttgcttattcgttgtttcaggggttacgatcccttggatcttcccatcatgaataactgcaatacggtcagaaacattcaaaatttcatctaattcaaagctgacaaccagaacggcttttccattatcccgttcttgaatcaaacgtttgtggatatattcgatcgctccaacgtccaatccacgagtcggctggctgacgattaagagatctggatcgcgatcgatttcgcgagcgataatggctttttgctggttccctcctgagagagccttagcaggtaccacttcactggctgcacgaacgtcaaactcttccatcaacttcttggcataagaggtaatatttggataatttaaaataccattcttgctaagaggttctttgtagtaagtttgaagagccatgttttcagagatcatcatatcaaggaccaaaccatcccggtgacggtcttcagggacgtgccctaccttcatttctgtgatttgacgtggacgtagtcctacaacatccttgcctttaatcttaattgaacccgattttaccttccgtagacctgtaatggcttggatcaactcagactgaccatttccatcaatccctgcgatcccaacgacttcaccagcacgaagttccagtgacaaattcttaacagctgggacaccacggttttcgtttacaaccaagttttcgatcgacaagaccacttctttcggttgagaaggacctttttcagtcttaaaggaaacagaacggccgaccatcatttcggccaagtcttggttagtagctccaccaatctctactgtctcaatagatttcccacggcgaataaccgttacgcggtctgaaacagcacggatttcatccaacttgtgcgtaatcaagataatggattttccttcattcgccaagttcttcatgattgtcatcaattcttcgatttcagctggtgtcaacactgcagttggttcatcgaagatcaggatgtcggctccacgataaagcgtctttaagatttccacacgttgctgcgcaccaacggaaatatcctcaactttagcatgtggatctactgccaagccatattttttagacaaatcaaggatatcttggctggcttttttaaggtccaaaacaccatgtttagtggtttcagaaccaaggatgatattttcaacaacagtgaaggcttcaaccaacataaagtgttggtgcaccattccaattcctaaagaagctgcttttgaaggtgagtctatgttaacagtatttccatttaccacaatgtctccgcttgttggttccaacaaaccagccagcatattcatcagggtagatttccctgcaccattttctccaagaagtgcatggatttcacctttgcgcaactgaagattaatcttatcatttgctacaaagtcaccaaattttttggtaatctcacgcatttcgatgacatattcatgtgtcatgtgggtgttttcctttcaaaattttttatttcaataaaatctgctagagaactaacagattttattgagacaaaaatgtctcactttaaaagaaacggcccttaaagggagggccgcccaatcaaatattatttttcaggaactttaagagatccatcaaggattttagctttggcatcttcgacagcttttttagcatctgcagaaaggttgtcagttgtcaaatcaactccaccatctttcaagctataagtaatcactttaccgccagggaatttaccgtcagcagctttcttagccaagtcttttacagattctccgactttcttcaagcttgaagccaagacaaagttagattttttaccatctttagaagtgtattcaccttcagctttttggtcacggtccacaccaagaacccaaactttttcgtcttcatttttcttctcgttcaagtcttttgcttcagagaagacacctgctccagtaccaccagctacttgatagataacgtcagcacctgcagcgtattgtgcagcagcaattgttttacctttagcagcgtcaccgaatgaaccagcgtagtctacttgaactttgatagatgggtcaacagatttaacaccagcttcaaatccagcgcggaaacgagtgataacttcactttccataccacctacaaaaccaacttgtttagtttttgtagttttcgcagcagcgataccagcaaggtaaccagcttcgttgtcggcaaagacagcagatgctacgttctttttaccttcaatacggtcgtcaatgataacaaagtttgtttcttcgttgtcagaagccgctttttctactgcatcacgcaaggcaaaaccaacaccaaagatcaatttgtagtcgttagaaacagcttcatcaaggtttgtcgcatattgagattcatctgttgattggaagtagtcaaatccgttccctttagaaagaccgttttctttcccccaagcttgcaaaccttcccaagcagattggttgaatgatttgtcatccacaccaccagtatcggtaacgatagcagctttcaaatcagtttttgattctgagtttgcgctatcttttttagacgcacgatttccacatgctgcaagtccgatagcagcgacagttactagaccaaggcctagccattgtttcttgttcattactgaacctcctaaattattgtgcaacattgttgcgaagtattgaaagggtcaaaagaccgcctcacagaactattaagtcaggtctgtaaaggaatatggaagtaattccttgaccgtcatcacgaccgtcgatttatctttagatactaaggttacaggaaggtctggctcaaaaaattcagccatgacctggcgacaagcaccacatggagagatgggcttttctgtttgcccgtagataatgagctcttgaaactcacgagctccttcagaaacagctttaaaaatggctgtccgttctccacagttggttaaaccaaaactggcattttcgatattgacacctgtatagatttcgccatccttcgttagcagtacagctccaattgggaaatgagagtaaggcacataggcttgtttactcacttcaactgctaagttgatcaactcagtagtcgccatgagccacccttccttccatgatggctacaccagaagaagtcccgatacgggtcgcacctgcttcgataaaagcaagagcatcttcataagagcgagcaccaccagaagctttaacacccatgtcgggtccaacagtttgacgcattaaggccacatcttcaaccgttgctcctccagttgagaagccagttgaagtcttcacaaagtctgcgccagctaacttagcgatttgacaagcaacgatcttttcatcatctgttaagagacaagtctcaatgatgactttgaccagcttatcaccgctcgcttcgactacagcttggatatcttcttcaactagtgctaaattcttagacttaagagccccaatattaatgaccatgtcaatctcatcggcaccgttttgaatagcattttttgtttcacacgctttgacaaatggtgtatttgctcctaaaggaaaaccaatgacggtacaaactttaacgtctgaatcgcgcaagccctcagtcgcaaaattcacccatgtcgggttcacacagacactcgcaaaatcataagccttagcttcttcgattagcttttcgatctgttcttgttgcgcatctggttttaaaagagtgtgatcgatatatttatttaacttcatacaatctcctgagctgcttaagatattatttcaataatttctttaacgctttcagccctttctagtattttaacattttttttgaattctgtaactctttcttgtgaatttttttcattcatgaaaatgcgggcaatgcgttccccttttttgacgtgctctcccacttttttgtcaaacacaatccctgtttcataatcgaggggatctgatttgacagcacgaccagcacccaggcgcatagcaaacaaaccaaactccatggcaggtaaagcagcaatgacgccatcttggtccgctgttacttcaaggacctgatccactttaacgggacgatgcaaatcttctaagtctccaccttgagccacaaccatttcttcaaacttcgctaaagcctgaccatttttcaagtgttcatggatggcttcaatcgattgatctacattggccaatttcaacatgatttgcgctaattcacaaataaactctgtgacatcagcacgcccctgtcctttcagaatatccagggcttccaaaatctctaaacgattgccaatactggttcccaatggttggctcatatctgtaataacagcgatggttttccgacccactgcatttccaagatccaccatggtacgtgctaagcgacgagcatcctcaatattcttcatgaaggcaccctcgcccactgtcacgtccaaaagaatggcatccgcaccagcagcaattttcttactcatgacggagctagcaatcaaaggaatggtatccactgtcgccgttacatcacgcagagcatacaagagtttgtctgcttttacgagttggtcggattgaccaatgaccgataagccgatctcctgcacctgctggataaattcctcttgagtccgttcaatctgaaagcctttaatggattccaacttatcgatggtcccacctgtgtggcctaagccacgaccactcattttggcaaccggcactccgaaactcgcaaccaaaggcaccaagaccaaggtcaccttgtctcccacaccaccagtcgaatgtttgtctaccttgattcctggaatagctgacagatcaaactgttgccctgttcggaccatcttcatggtcatatgagaaatttcttccgtcgtcatccctttaaaataaacggccatagcaaaagcggacatttggtaatctggaaccgttccagccacatagccctcaatcagccattcaatttcttccttgtttaaggcaagaccatctctttttttctgaatgatatctactgctctcatgattctttctcacttcttaaaatataatagcctttgtctttttttacggtctcacaattgccaaacgtctcttccatcttggccttagcgctgggagctccttgttttttttgaatgacaatggtcaaatctccacttggtttcaaatgttcaaaactaccagtgatcacttggtgaacgactttcttaccagctcggattggcggattgctgatcacatggtcaaagaccccttctactgcttcatagacatctgaagaaaagatctgagcttccacgccgtttcggctggcatttttctgagccaagtccagcgcccgctcattgacatcgaccatagtcactgcaactccctgggctttagctagagaaaggccaattggaccatagccacagccaacatcaaggacactttccccttcttgaaaatccaaagttgataagagcacctggcttccataatcaatcatttttttactaaagacgccggcgtccgtataaaaattcatcttttgccccaataaaacaacagccagatcatgaatatcatgggctgcatctgggtttacatcgaaatacattttactcataaggttattttatcataattcactccttttttaaatcgtttacatgacctctaaaaattggtatactaaagactacaataggagtgacatatggacaaagaatttctacattttgaaaaaattaatcgggaaacctggcaaaatttgcaccgcaaaaccaccccacctctctctcaaacagagctcaattctattaaaagtttcaacgaccgcatcaacctccaggatgtacgtgacgtctacctgcctttgacaaacctgattggaatctacaagcgttccaaagaagatttggccttctcaaaaggtatttttcttcaaaaaacgagtgaacgccaaccctttatcattggggtttcagggagcgttgcggttggaaaatctaccactagccgtttacttcaaatcctgctgtcgcgaaccttcgaaggctcgacagtagaattggtgacaacagatggcttcctctatccaaatgctatcttaaaagaacaagagatcctcaatcgaaaaggatttccagaaagctatgatatggaattgctccttgattttcttaatcaaatcaaaaacaacaagagcgtagaaatccctgtctattcccacgaaatatacgatattgtcccagatgagaagcaaacgattttaccagctgattttgtcattgtcgaaggaatcaatgtctttcaaaatccgcaaaatgacagtctctatatgaccgatttctttgatttttcaatctatgtggatgccgcggtcgacgatatcgaatcttggtatatcgatcgcttccaaaaacttcttgaattagctcaaaatgatcccaataactactactatcgatttacagagcaacccctagaagaagttttaagcatggcccatcaggtctgggaatccattaatttagttaacttacaacattacattcaaccaaccagaaaccgagctgatctgattctccataaagcaaccaaccatgaaatcgacgaaatttatctcaaacgctagagaaaatggcctgttaacggtacttttttaaggaaaagctattttaggcttgtcaaatcttaacttttcatatataatgagatagttagattatcaatggaggtgaataacttggcaaacattaaatcagctatcaaacgcgctgaattgaacgttaaacaaaacgaaaaaaactcagctcaaaaatcagctatgcgtactgcaatcaaagcttttgaagcaaacccatctgaagaactttaccgcgctgctagctcagctatcgataaagcagaaactaaaggtttgatccacaagaacaaagctagccgtgataaagcacgtcttgcagcgaaacttggttaatcaagaacagcataaaaatcaagctctccggagctttttttgtgcctaattttttgagaggtgcttatgaaaattgttattatcggctattctggatctggaaaatctaccttggctgaaaacttagctcgctactactccattcccaagctccatatggacacccttcaatttcaaccgggctggatagacagtgaccgggattggatggagaaagagatgagacagtttctcagcgatcatagagactgggtcattgatggcaattactcttggtgctgctatgaggaaagaatggagcaagccgaccagattatctttctcaacttctctcgttggaactgcctctttagagcctggaaacgataccgccgttataaaggccgagtccgtgagagtatggcggcaggttgccccgaacgctttgactgggaattcatccgttggatcctttgggacggtcgccaagctagacaggtcacacgctatcagactatcggccaaaactatccagacaaatttctctctctcaagaatcaaaaagagctggatgagtttctaaaaaacatacaataaaaaggttgggatatctatcccaaccttaaaatgtagacaaactattttaaagtaaaataaattaagcgattctgataagaaataaaattgagttcaattttttagatgaatcaagaaaataccaagactttccgctgtgagtaaagtgcctgaaacaataacgattcaggcactcggaattattgagaccttaggctcaataattagtcatggaacttcgtagaagttcgctgacgtccgtactcacctaaggaaagttttttatatgactttgtcttcaatctgaggttgggatgtcaatcccaaccttttttatttatcaacgtaatcgccaccggtgaagccatagtattcttccagactcaaacctgagtcagcgatatcttgtgcttcttttccgatatagcggagatgccagctctctggcatgtagcctgtcactttttcttttccttcttggtagcgaaccacaaagccatatttagcggcgttcttgagcaaccacttacttggtccaggttcagttaccaaattaccactggtatcgatcaaatcaaaggtcaaaccagtttggtgttcactataacccggtcttgcggaataacgatctgctgcctcctgaccatcttgattgacatagttttgatagaggccaacttgggtatcgtagctacgaaaaccactatattggtcactgatcggataaccttctgcctgcatggctgcgatcaattcatgaagggctgaaacagcttcaggatcttcacctgggttaaagtcaggcgacaagggataatgtttgttggcgatcatgacctcaccatatttccctttgacactatagtaggaaccattatagctgacaccagaatccactttcacatctgacttaccagcttttgacgactcttctttgccagtttcttttgacgtatcctttgcagaagacgttcctttggaagacttagtctgcgtttgtttagtttcttctcttgcagaagatttagaactagtggattgagattgggagcaagctgtcaaggttaacaaggcaactgtcaccaaagttaatttggaaaatcttgctttcatgaggaatctcctatgattcttttgttacgacaatatccgtaatcacataacttgcacctacttttttcaaagtgtaggtcttgtacttgcggttttgtgaatctggatggctatcggtataatgcacggtaaagtcttcataagtcttgatcgtcaccacaccattttcttcagtgacactttgaatgtccaatgctcctggagtatagtagtcaattttagcctttcgaacaccatcaccagttgtgaattcaaccatgtccttgtacgcttgactttgtgtgtcatagtatttagagtaggtgttgtttcggtttgaaacggagctaaagactgcgtcgcggtactctttcaagaactcttctgccaaggtccgattttgttcttctttggctgcttgctctttcttagcatcttgtgcactcttgatgcgttttagggtatctttggctagtttaagttcgatcggatcgttctcaccctcttcaatcgtcaccttagccttctcagttgtataggtttccccattcatgttgaagacagcatgcacttcaatttcttgataagggatgctatctacctcaaaggtcgtgctggttccgacttctttgccgttaaccacaaccttcacatctgttgggttttcaacttcatctggaaactcaacttctaaattgcgtttttcagaattcaactgcaattctaagttattcttggttgcttttttaggattgagatggatcttagaagtaacatttccgacctctgttttagcagtcaattccatttcttttgtattgtaatggaaagaaccaaggtctgtcactgcatctttcttcaaggtcaccgttttattggcagccactttaagtttggcttgatccaaattagtcttgaccttcacttgcactggatagctagccacacgatattcttggaagattccaaatttcttgtccgccttttccaaaccaaagatcttgtttccagatttatccgtatagctgccttctccaccattatcgatgatcttgttcaactctgtaccgatatcaatcccttgatcttccatgctggtaataaagctttcggcttcatcctttgtccatttatcgttatcggttgaaagcagatctgctgcttcgcgataatccttggtgtccactgccttaataaatttatctgcagtcacttcgacacgcgttgttgactggaagtaaaagaaggctgctaccaaagcgatcacaaggactgcaatagcagaaataatcccaattttcttcttggaaagtttcttttcacccttcgttttaggggccttttgttttttctgagctgggcctgcttctgtaacatttggaccagcaaagacctgcgtttgctcagcggcaagtggagccgtatactcttgagtttgctgttgagggacatattcctgtgtttcttcagttgcatctggggttacaaattctgcttcaggcacaggtcctacaaaaaactcaaagttttgacttttagccgcggtaaattcttctgcacttggcttgcgcccataggtttcttcaaaatgttgcaaccaagcctgacgagctgctagaagaggatcgacattcttcacttcttcaactggttcaagcaccggttcctctacaggagctacttcttctggagcattgcctgcgatagactgaatttgttttaaatcaaatccacaggctttcccagccataaactcttctggtgacggtttgcgaccaatcactttttcaaataattcaacccatttcttttgcatggatctcttctccctcattataaaatagggaaagtgggttcccccaccttccgttttgtgatattgttagaatccaaagttagagaaatttggagcactaggaataaatcctacggctacttgttctaaaatacgagcattcacataaatgacaaagatggcaatgagaagcaagacaacagatgatgctactagaagcaagaatttatctgctttaaagcttgtcttgttcaatccttgatgaacgacatagcatgttccaacaaagaacaagaagaaaataaggaagtttacaaagccataaaattcataaacttttacaagacctactaagaaagcaagaagggcaagtggcaaagtgtaaacagacaaacgtccaaactcttcaaatgaacgaccgtaactgtattccttatcttgaagaaccacacgacgaacaaagaatccagctacttggaaggcgtaaaggctaaagaatagggaaatcaatgtcaacataaaggcacggaaatccattccataaccacctgtaaatccactagctgtgaagaaagtgcccaaggtcaagacaaaggcagttaagacatactgtaaaattccgttaagagcttttggattttctacagctgttggacgtttcaaagctgaaaggaaccaattccagtaaccaccaacggctacaccaaattgacttggttggccaggataaggttgtcctggttgaccttggtaaggagcctgttgataagctgcttgtgtaggttgttggtaggtttgttgtggagcttgttggaaagcaggtccattcgctggagctgcttgaggggccggttcttgaactggagctgcaactggttcttctgcaggagcagctggcgctgcgacaaactctggagcttgtggagctgcgactggttcttctgttggggcagttggtgctgcgacaaactctggggcttgaggagctgctggcgctgcaacaaactctggggcttgtggagcagcaactggttcttccacaggggcagttggcgctgtaacaaattctgggtcttgtggagctgctactggttcttcaacaggggcagttggcgctgcaacaaattctggggtttgtggggtttctggaaccactacttcttcttgaaattctcctgcagccagtgcttgagcaatttcttctgcactagcagaacgaccatttacggcttcgaaataatccagccaatcttgttttgacataatgaatctccttaactattgtttatactagggtattatacaaaatttctgaaccattttcaatgaaagactgggaaatccctgtaatatcttttgaaaaacatacaaattctactcatttttagaaattagtaaagaaaacgacctcttttcagaggtcgtttcttaggattcaaatgcatccatgccgccttggacgttggtcacatcatagccttgctcttccaaaaattggcaagcacgtgctgagcgtcgccctgacttgcagatgacataatagggatgatccttctctaattcctggtagcgatttgctaactcagataagggaagaagacgaaccccatctaagtgaagggcatcatattcctcctgctcgcgtacatcaagaacgtgtaaatctccttgttgataagcttggtaaaagcttgaaaatggaatttctttcatgatttctcctttgttatggaagggttagaatttcataatgaaagccaatagcctctaaaaatcggaacaagtcttgggttttaataaagatcgttttttcgttggtattgggatgaaaggtcatgatctcctctgacacaatgtctttatcgaaatagactcgaatatctttttcttcattgttcaataaaccaaatggagaaaccgttcctggcggtaattgcattttttcagctaaagaatctgctgaagccatgcggatccggttggcttccacttgctctttgaaatcatccatatccaatggcttctggtcatccatgatgagcaaatagtattgggttttcttcttgttggtcaaaaacatggtcttggtccggacaccttctaagccttcaatataagaatccgcttgctccgtcgtgaatgcaggtgggtgttccaccacatcaaatgaaattcccaactcatctaatttttctttaacttgttgataaggatccatcttcgctctcctttatttttgaatgatctcttggactaaggtttgcaattctgggaccacttctgcctcaaaccaaggatttttagccatccagatttgattgcgaggggaagggtgaacgagtggaaaataggttggcaaataatctttaaaatggtgaacccgttcggttaccttgccactaaccttttcatgaaggtagtatgcttgggcatattgtccaattaagagggtcaattcaatatccggacactccttgaggagttgagggtgccacttttccgcaaagcctttgcgaggtggaaggtcaccagattttccatgccctgggaaataaaagtccataggaatgaccgcaaacaaaccagaattataaaaggtgtcttcgtcaactcctaaccattcgcgcaggcggtcaccactcttatccttccagtaaataccagcttcttccgtcttcatccctggagcttgtccgatgatattgatgcgagctgtctttggagctgcaaagagtggctcgattcctttatccgtatattctttattttgaggatctgccataatggcttgtttaatgctttcaatcgttgacataagtcctccttctatggaaaaactcagccagaaaaactggccgagtagtggattatttgattagttcatagatggcttctgcgtaaatagctgctgcacgatagaggtcttcaacatctgcgaactcattagcttggtgcatagtattgacatagtctgggaacatagctccaaaggcaaccccacgtttcaagaggcgaccaaaggtaccaccaccgatcacttgttcatgtcctttgaggccagtttgtttttcgtaaacacgcaagagggtggataccaattcatcatccatcggaacatagtgaggtgtgtgaccgtgggctgacaagcttactgtagccactccttcgatcttttcaagggtggatttgatggtttcaggatctgtaccttgagggtaacggatattgagggcaatagtgttgtctgcttggctttcatcaaaatggaagacacctgcattcatgctcaatggtcccattttcgcatctgtatgggcaattcctaatttttcaccggcaaaatcttcgtgaagaagtgaagctgtcacatgaaggtaagccttagcagcaccaccaaaatcaaattggttcaacaagagagccaagtaggtcgcaccattaattccatcttcaggggttgatccgtgagcagatttcccaacaatcgtaacggtataggtttcttcatcaacagttgagatttcatactgaagctggtgttccttagcaaaggcatctaagaggccagcaagatctggtagttgtccagaaacgactgcagtcgctgactctggtaccatgttttcacgaaggccacctgtaaagctatgaagatgggcacttcctgtgttgtcatttccaaaatgaaggtactcagtgatgtttcctttttccccattgatgattgggaattccgcatctggtgagaagccaaaatctggctcaggaagtccgacatgtttgaaatagtaatccatgtcgccccatcctgattcttcatccgtaccgacaacaaagcgcacgcgcttagaaacagggagtcctaggtctttaatgatcttcaaaccatagtagcaggccattgtaggccctttatcatcagacgaaccacgcgcatagagcttgccatcgataatttctggtttatatggatctgtcttccagccactacctgcaggcacgacgtccatatgggcaaagatcccaagctcttcttctccttcaccaaaagtaaagtgaccggcataattgtcgacattcttggtttcatagccatcacgtttggcaatttccaagaatttttcaatagcttttacaggaccaggtccaaaaggatgctctgcatctgccttgctgtcatcgcgttcagaattgatttccaagaggctgtataggtcagccatcatctcatcgcgacgtttttctacttctgctttaaagtcaactgttgtcatgaattcctcctcaatcttcttattgctaattggcttagcgtttgtcaatgatttcgtccactggtaagcgatagcttggctctactttttcagccgcataaccaaccgtaatcaagacttccggacggaaacgctcttcgatgtccaatacttcattgatttttgatttatcaaatcccaagataatattggttccaatgccttggtccgtcaaagcaagtaccaagttcatggccacaagaccggcattcaaagccaagtaatcacttgtttgttgggcatcatagcgcgcaaattcagcaggaagattttgcataaagtattgcaactgctcgtctgtgaagtttttcactccaccgacacgcgcaatcttgcgagcccgtttttgcaaatcagtatctgtaaagagggcgatggtcacaggtgcttccatgacttggtcatagtttgcaccataggctaattttgccaattcagcatttttttgacgaacgaccacaaatttccaaggctggctattgtgggcgctaggggccaaggtggcgatctcaatggcagtccgtacatcctttggatcgaccggttgatcagtgaaatgcttgatcgtatggcgttttttattgagctctagaaatttcataagcttcttccttttctatttctgttacctctattttaacacaaaatgaaagagcttgcagggttttacagcctaagattgtgaaaaaagaagcggacattttgaagatccgcttcttttttataggttgaatacacaagagatctatctatgattcattggaaagattgaaataggtagctacttctttggcataaccgtatttctcaattaagctagttagaagctcgatgttatggccccgataattatcctcgcgtctcaattcttcgtacatctcaataaaaggaagacctttgtccttagcatcttggagctctgcttcatagtcataggccaccttacgaaattgcaggttggtcaccccatcttcttcgacatcgatcagagtatactgggccctgtggttttgaattggttcccagtcgaaatatggcatgccaatagtccctggattaagaatctgctggccctgactgccatagcgaagcaactgcttgtgaacatgaccgtagatcgccatatccgtctggtcatccagcaattggtcaaagttctccgtcacatttgctggacgcaagtctccaccataattcttttctggcaagttgtgggtcagtgaaaaacgaataccattgacctccttcttctctaccaatggaagcgaacgaaaccaatcgatccgcttaggatctagtccttccatgaggtactgagtgaggcgaagaagttggatctcctgcggatcctctaacccgtactcgccatccaaggcctctaggacacaatcatcccaatttcctcgaacagccgctgtaatcggaatctcatccagcaactcaaaaaggtcctctcttccaggccccggaagcaaaatgtctcctaaaagccagtattccgttgtgcctagagcacgcgcatccgcaatcactgcctccagggctgtcgtatctccgtgtatatcagataaaatggcgattcgatggttcatatctactcctttatggattgaaaaatctgtgtgccttaagtataacaaaaacgagcaaaaataaaaaatgtgatcacacttggatatcacattttaaacgaccagtcatcatttgatttcaaaaccataaaaatattttcttccttcgacccagtctcgcttggaaacatcttcaatgtaatcaatcatattatcgatatcttttcttgaaattgtttcgttaacttttactggaacccttttaccagtaaatgtagaaaggagagtagattgaaggtatttatgaaacttaccttcaacttggataccagtatacaatgaagtcatgatttccttagcaaacattcccggaaagacaggagagcccttatagtaataggtatctggttctttctgttcgcttactagcgaccataattcttcaacctcttcttcggttgcttcctccgtcgataatttctgatcataaaaataatcatccaatgcatcttggatcgcatattcaatgtctgaatcgctatcttcccactcgtcccaaagtgcaagcaaataagggactacttcataggacatcgtgtccacagcaccagtgacaaatgtaaaaatagcaaattctgacacatcggataaacatctaagattggaaacatcccttaaatcttcattggtgcataccgagcaaaacaatcgaatacacaaatttaagacagattcatctttcgtttgattcatcagttcaatcaacaatggtttaactgaaaaatcccccttttttaatatctctgcaatcagtaaaatacattctttttcatcagaaatagactctagattagttttcaactctttaagagacaaaggactaaccccaccaaaatctactcctgtcagtagtaagttattttccatcaaacctaaaatccattcgttcctattgtattttaagacgtgtgatcacatctcgccccgcctaaatcagcatacaataaaactagtataacaaaaatgagtacaaaacgtgaaaaccatccacatgaatatgaatggtttagactatattataataaggttctagaatgaactagatattcccttcatcatcggcttcttcatcctctacaacctctacattcaagtaaccattatctaggtattcttcatgagtgatttcaccgctatgatacataaattgcttatttaattttatggacatttgattaaattctgaaaagctatctgctaatccgtctagagccaaaaagacatctacaaaaccagttgtataatcttgatcttttgatgaagaaatcttatctttctttttgtctaacaaggtaattccattttttaattgctccaagtagtcttctatttcattctcacaagtttttaaatcaataagatattcagaattatctatatgctgtttaatatttaattgttcaaaaaaatcgatatattgtcttattagtttgcttacttcaatcatttatttagtctccgccctgctcctaatttggtcttcattttgtttattgtaccgtcaatatttattacttttttaaattctccattcgacttaaatacttccaaatggtctttatgcataccatctaaatatatctgatcaccttttttaagcccaggaatactcttatctactacttcataaatagtttgtccatcatatcgcttctttgtctttctcaccgaactttttaactgttcaccaaaatccgtctcaaaaaattcttgcatattattaactggtgtaggaatcgatcttcccccacctctaccttcaaatgctgcaatcttctgtttgtgatcgactgagatttgttggatgcgatcggcgaaatcatctatcttcgttgagacgttagactttggtagattaacatttccatcccctgcaagagcaaaggcaggttgacgttgatttccaatggaatccatcatgttttgaacattttgtcgacctgtttccatcgcatcattgaagttccgaatcattgaagttccgaactttattggaagcgcttctgctcctgctgcaacagttttgttcttcacatttgaaacacggttcttgaagttatcaaaagcttctccagcttgaaccttgacatcacccaccttggtcttaacttccgtccaagttgttttgacacgatctttaatactagccttaaagctagtcgcttccccactgtggatgttcacattagctgcttgacttgctctataggatttgtatttattcccgaggtgaccagtagctgactggtaaaaaagtgttagaagtttaaatcaagtataacaaaaactcacaaaaataaaaaatgcgataacaccttagttaccacattttggcatggaacgagcctgatggccaattgaaatttttaaattattgatttttagcaatctttataaatgcttgtttaaaatcctcatacatttcaaaagcaattttcataacatcccgaaaatcaatataatcagaaataactggatctagaataatatactctctagaaattagccatttcaaagggactacccatgatgactttatctccttcatatatgacccaaatcaattccaatctaccatgttcaaaaacaaaatgaaaaccaaaacgaaaattctcaacttgctgcaagttaatatggaaaaatcgttctcgcttatcatattgaacttcatagcccaatgactctacgatttccaataaataatcaagctcttgaccctctggtgtcctatctttactgcaagtcttttgcggactccgccacttccatcaatggacttgcttcttcctgctttccttgatggagcttggcttgcaccgcctccgcgactgctcgtgggatgccaactgtgacgatctcttccacagtagcttctttgatcttggtcagtgacttgaagtgtttcatcagcaactgcttgcgttttggtcccaaaccttcgatgccatccagctgggaagagaaggaattcttggaacgaagctggcggtggaaggtgatggcgaagcggtgtacttcatcctggatccgttggaggaggaaaaattcctgcgaggttcgagagagttcgatgacttggagaggatccccaaagagcaattcatgagtctggtgcttgtcattcttttgtaggcctgcaataggaatatccagccccaactcgtcttgaatgacttgcttagcgatattgacctggccctgacccccatcgatgacgatcaggtctggtggcgtcaggccatcccgcatgacccggctgtagcgtctgcgaatgacttcccgcatgctggcatagtcatctggccctacgacggtcttgatcttgtacttacggtagtcctttttgcttggcttcccattgacaaagaccaccatggcagatacgggactggtccccataatgttggagttatcaaaggactcaatgcgcacaggggttgggatttgcaggagttttccaaggttttcaatggcaccttgagtcttttccatcgatttttcaagaagattgaacttctgctccagactgacacgcgcattcttgatagccagattgaccaactgcttcttctccccacgctggggcttgaggaccttggtctccactagggccttgaccgcttcctcatcgatatcctgagggatcaggatttcattggggatcaggtgagatttctcctggtaaaactgccccacataggtcaagaaatcctcatccggatcattgtagtaagggaagagattgacgtcacgctcgatcagcttgccctgacggacaaagaagacctgcacacacatccagcccttgtccacgtagtagccaaagacatcccggttctgcaaatccttggccatgacccgctgtttggtccgcagggtcccgatggcctggattagatcccgatactcggctgcccgctcaaattccatgttttgcgcagcggtattcatcttgaacttgagctcatcgataatcttatcatcctgccccttgaggaaatcagaaacctcctgcgccatgcccttgaaataggcctcgtccttgtggcagactgtgtgggccatgcattgtcctaaatggtagtaaaagcagactttggaaggcggattggtacacttgcggaaagggaaaattcggtccaaaagcctcttgatctcattggccgctcccacatccggatagggaccgaaatagagaccaccgtcctttttgacctggcgcgtgatgatgaggcgcggatagcgctcattggtaatcttgatgaagggataggacttgtcgtccttgagcatgatattgtacttgggcttgttctcctttatgaggttgatctcaagaagcaaggcctcaatattggattcagtgacgataaattcaaaatccacaatctcagataccagggcttccgtcttggtatcgtggctccctctgaaataggaccgcacccgattgcgaagattcttggccttccccacatagatgatagtaccgttcttgtctttgtgaatgtaacagcccggactcgtcggcaaaagctcgagcttggatttaatcaagttattcatactctctattatatcaaaaaagagaggcgcttacctctcaattgtatgtatccaactttacatcctcagcctttgagattagccatctggaagatcggaatcacataaggaacaatagacatcaggatagtgaataacacgaagaaccagaaccagaaggacgcgagggcacgctggaaaactcccggttgaggtttattggcttgtatataagccttgatagctggccatttagtcgcaagaaccactatcatgacaatggaaccaatggctaaaacaccgatttggagccaattcgctagtccctcgtccacatgataggccacataatgcaagccttgggaaatcacaaaattattgaaaatgtgatagaaaatagcccaccagatattgtattcaaaggcaatgtagccgaatcctagaccaatgatacttgcgaaaaagagctggtcaaaattggcatgaaagagtccaaacaagatagccgtcatgacaatggcaaagatcttcccataccgttccaagcctcgcaagcctgccccacggaagaagaattcctctgttattggaccaaaaaagccagcatacaagagcatagtccatgatcgctcaatcgtatcacctagatctggtgttggagaatgaaggccaatggtctcaaacatgcgctcaatcacttgtgtcatcacagatgaaaagacttgagaaaagccaagaaaggcgagaagaataaagaagactgaaagtgtcatcttacgtcccttatgcttaagatcatatttataaagggccttcttgcgataggcattaaaaagaaagagtccaatggaaatagagatgaggtagggaataccagcccaaacattcagggcgtttagtttctccgttacttgacttggatcttttctgagagagcctgctagggttaagcctaagaggacttcccacaggacggttactaaggtcatgaccaagagataaatggcaagtgtcccggaataccttcctatatcttttttagggtctaataatcggttgtattggttcatttcttcctcctagaaaatagataaaaacttgcacacattccttcgtataagacaaagaaaatcaaaaaggcatgcataaagtagtcttctggtaatgcaagaataatcgaatccacgcgcggatcaaagagccaagtattgtccccagcaaataagacctgatgaaagagcgtaaagaattgatcaaagccaatcataacagctatcactgcaagcactactggtaaaaccatcatccaaaagaagagactacggtacaaggtcaggtagccttttttgacgactgtccgcataaactggataaaaccaggtagtgtcaccacgaaaacaactgtcactaagtgaaataggtacttgacagcctcaaaatggtgcagtccattttttgaagaggggaattgaggcatcttcaacacccattgaaaagggttggtcaagtagttcatcaagacattaaaattcttcatgatgacagatgccgaaaaaccagtccggctttgaatccccaaccaatgaatctccatgggatagaggacccaagcgagagcaatggtgagaaggattgctgctgataagataaagaaaaataggttaattgatttcaaacttttaagcatcaaaatcccactccgctagactggcaacaacatgtgtcggtgcgattggtaaggttggcacttcttctggtttggtaaaacctgtcgtcaccaaaagggttggaatcccattgtcaatacccgcacgaatatctgttaaataattgtccccaaccataaccacttcttctcttgcaagacccaggtgttcaatggccttgtccatgatgatggactttggtttgccaatgatcacaggctcgacccgtgtcgctgcttcaacaagcgcaatcaaggatcctgcacctggcagcaagccacgctctgttggaatgttgaggtcagggttagtcccgataaagtgcgctcccttttgaatcgccaaggtcgcaatagcaaacttctcatagtcgacttgccaatcgaggccaatgacaacataatcaggtgcttcttcatccatgacataaccagcttcttcgatggcatctttgagccccgcttcgccgatcacatagacctttttgcccaaattttggtcattcatgtagtcaatggtcgcaagggtagctgtatagatagtcgaaactggggtttcaatattgaaatgagtggccagcatatcccgaacagtctctggtgtgcgggttgtattgttggtcacaaagagatagggaatctcacgcgcctgcagttcatgaacaaaagcttctcctgcaggaattcgtgattttcctttgtaaatagtgccatccaaatcaatcaaatagcccttatagtgcatttattcttccctttctgtgtcagcttcttcatacaacttctctgtatcgactcgtccaccagatccatacaagagcaaggctccagcatagaggacaaattgtaaaatcaaccctgtaaaattaatcccttgacttcccgattgggtgaacaagaaggatgctaccatgaggatcacaatggtcaataacaagcctatcacggttgcctgatccacactgatttgataaaccgtgcgtttggtgctccgatttttcccgtcagacttagtttctggttgcaaattctccacaaaatccgtcaccaaggtcgcagcgaggctgactgttgtgctaaagagcacgccttgggacaagcggtgatagaaattggaccagaaggatcctgattggctagtaatcccaatcgagaagatcatgaccggtaaaagaaaggccaaggtgaaatggatccagacccgataccagcgtacatcttctcttaaaaagcgattaaaactctctaaattcaagcgatagcggaaaaatttataaatttcctctaccaggatgatgcccaaagcacaaagagtcaagagccaatctcccaacatgtacaaagggttcttttgacgcttggcataggccacaacccgtttttgatagttttcaagttcctgttttttattttttagtcttctactttccataagtccaacccttttcttctacttcttcccactcaatttcagcttgggcattgatctgaccatctgaagtaatttggtgctgagttttcaagccctcttgttcatattgagaggtgatgagacctcctgctagcacttctttgacatatttaagatgaacttttttagggacatgatgggtcaagaagtctgctcccatcacctcaaaaacccagtccaagtacttgctattgttgacatgtccgttcatatccaagtcgtaaaaccgaacccggtattcttgttcgacgccgccttctaattctttgaaacggggaccgcggagcatggtttttgaaaattcagagtcaaaggcatccgtaatttcactcataacaggatgaaccttgcgtgtatcccgatccatcaagacaaaggtcgcgaccatctcaatgatagtatttcctgcttcatccttgatattaaaggcccggtagcagaaaagtcgattgtgactcttggcataggtttcgatagtgattttctcatcaaaaacagggagacgctcgatcttcatattgtaatccgtgataatccagactagattgtagttctctaaaatatacatatcactcatacccagctcaatcgattgcatgcccgatacctgtaaagacagcaagatcaattggggaatcttaatataaccattgacatcgctcatatcaaacggaattttcatgctgtattcaaatgtttttgccattttctactccaaaataaacttctctgctacagtgtctcctaaaaagagacctttcttggtcattcgtacaatgtccttgtcaggtaccaaaaggccctgctggatcaattcctcaaccactgatccatattgttggtcaaaattcacaccaaacttttcttcaaaacgcttcttggaaacgcctgttttcttacgtagtcctagaaacatctcttcttccatcatttctgtctgagtcagatgttcttcttggacacgcgcatttccctcttcgacagcctgcatatagtgacgaatggggccatgattcttgtagcgaatcccatcgacatagccggatgctccagctcccagaccataatactcggcattatcccaatacatgagattgtgtcgactttcaaaaccaggcttggagaaattggaaatttcataatgctcaaagcccgctcgctccaactcctgaataatgtattcaaacatctctgcttccaactcctcttttggtagaggaagcttgccccgtctcatgcgattcataaagactgtgtgattctccagaatcaagctataaagactcatgtggggaatgtcaagggcaagagccttagcaacattctctttgacctggtccatggtttgtgtcggaagcgcatagatgaggtcgatcgaaatattgtcaaaaccagccagcttcagacggtcgatattgtcataaatgtcctgctcttggtgacttcgaccaatcttcttaagtaagcgattatcaaaggtctgcacgcccaatgaaacccgattaaccggcgaatctttcaataccgcaatcttatccggatccaaatcaccaggattggcctcgatggtcaactcctccatctgagaaagatcaagtgacttggtcagctccttgagcagatactctagctgatccgcagttaaggctgtcggtgtcccacccccaatatagagagtccgtaaatttgtgatttcttcccgacgaaattcttggatcaaatgatccaaataagcatcgaccggttggttcttaataaaaaccttcgaaaaatcacaataaaaacaaatctgggtacaaaatggtatgtggacataagcggacgttggttttgtatgcatacttttaattataccataaaatccccccgagtccgaaaagaaaagggaataagaagcaaggaattccttgacaagaaggaatgaaaggaatagaataaagctaatcacattcggaggtaaggagatatgaacaactaagtttcgttaaataagatactttatttagtggaccgcttgttctatctcttttcgtgtgccctctcgcctattgtccaactttttgttggcttaataaggtctttttctgtttgggtccacttgaatacagctctactaaataggtagagctgtttttttgtcccagtggaaaggaatcttatgctaaaactatcccacctcaccatccgccacacaaaagatttacgcgatctggttcgcgatctgtccctaactattcatgaaggggaaaaagttgccattattggcgaagaaggaaatggaaagtcttctttgcttcatgtcctcatgtccccaaaatccctaccagattatctgactatagaaggcgaaatcaccacttcttttcactcctatgcctatattccccagactttgccggaagcattgaagggaaaaacattggaagaatatttttttggagaagacgagctagactatgccaccctctatagactggctgatcaattgcatttcgatagcgaccgctttgcgagcgaccaagctattggaagtctatctggaggagaagccctcaaagtccaactgcttcacgaactttgtcgtcctcatgaattactatttttagatgaaccttcaaacgatctggatttggaaactctggactggctccagcagatgatccaaacgagcccccaaaccatcctatttatttcccatcatgaggattttttgacgcagacggcggataccattattcacctaagacagatcaaacaccgcaaggaggctgaaaccattgtagagcacctaggctatcaagactacagtagccagagggagcaacaattcaagcagcagtcccagcaagctgctaatgatcaacgaacctacaagaaaacaatggaaaagcatcgccgcgtccgtcagcaagttgaaacatccttacgaaacactaaggatagcactgctggacgtctcctggcaaagaaaatgaagtccctcctctcacaagaaaagcgctacgagcgagaattccaatccatgactccccaaccctatgatgaggaagtcatcaatctgcatttccctcccctcactcccttgtctcctcaaaaacgagtccttctattagatcaggaagaactcgcaattggtgaccgggtcctggtcaaggatctctcccttactcttcaagggcaggacaagatagggattatcggttccaacggtgtggggaaatccactttccttaaaatgatatgggaaagcctacagaagaatgaaagtatccgcactgcctatatgcctcaagattacactgaaggcctccctctgactcagacacccgttcaattcttacagcattcaggcgatcgcgaagaaatcaacactattcaattgcatttagcctccctcaattttacctattctgaaatgcaccatcctatctctgaactttctggtggccagcaaggaaaactcttcctccttcaattagtactcacaagtccccagtttctgctcttggacgagcctactcgtaatttttcccccacttcccaaccagaaattcgtcgcctattcgcagactacccaggcggactggttacagtctcccacgatcggaccttcctcaaagaagtctgccaaaaaatctatcgtctgacggaaaatggcttcgtagagatagagtcgctctaacgtaaaaaaagatcggccaaaaaaccaatcttgtagaacgaagaaaaaatgttctattatacaaatctaacaaatccagagttatccaagcctctattgaaacttttccgccgtgagaaaagtgcctgaaacgtaatagtttcaggcactcggaattattgagaccttaggctcaataattagtcatggaacttcgaagaagttcgctgacgttcgttctcacctaaggaaagtttctaagaggactttgtcttcaatttgaaagattggcaaaaaccaatcttttttctaattcttccctgcctcttgtcccatttcttgggtgcgtttgtaggcagcttccacacctgcaataatgttgccccgtaggccgacttgttctaagtgattgactcctgcgatggttgagccacctgggctacaaactgcatctcgcaagcgggctgggtgctcacctgtctctaggaccatttgactagcgccttggaaggtctgtgcagccatctgcaaggcttgctctcgtttaagtcctaatcctactcctgcatctgccatggcttcaatcatctgatagacaaaggctggaccacagcctgcgacagccgttgcaggatccatcaatttttcttcaatttcatagagagcccctgctcctgctaagagctggtttactttagctacttgctggtctgtcactgcttgagagcgggctagactgataacaccttgaccaatggccacaggcgtattgggcatgatgcgaatgagccctagctggtcgttctggatcacgtcagccatcttttctagttccaagcctgcagccatggaaaccagtaagagattggagcgttgggctaagatgccctgatactcctctaggagagggcaaatctgatagggtttgacccctaaaaaaatcacttcagcctcttgaaagacttgttcaagatcagacgccgttcccccatactggctgataaactcttgcaccttttgaggagaacgattgaccaagagcaggtcttgcgcatccacttcttttgcgactgctttggctaaactagctcccatatttcctagtccaataaatgctactttcattttttacctcacttgaccatttccactgacgatatacttgtaactggtcatttcccggagtcccattggtccacgcgcatggagtttttgggtcgagatccccatttcacaacctagaccaaattgacctccatctgtaaagcgtgtagaagcattgacataaaccgctgctgaatccacctgcttggtgaagtaagcagaattctcaggattttcagtcacaatagcatccgaatgatgggtgctatgagcttcaatatggtccgtcgcttcctcaactccatcaacgaccttgactgctaaaatataatctaaaaattcggtatcaaaatcctgttcctgtgcggctgttccagaaataatagcctgtgcttgctcatctaggcgcaactcaacggatctttcccgatcatccactaaacgcgatttgaccaaaggcaagaagtcagacgcgatcgctcgatccaccaacaagacctccagggcattgcagacggatgggcggcttgtcttggcattttcaataatggcgagggctttctggaagtcagcctccttatccacatagacatggacgatcccagttcctgtctcgataacggggacaatggcattttcaaccaccgcttggatcaatccagcaccaccacgtggaatgagcaagtccagatagcccttagccttcatcatagcaaggctagaagctcgactcgtatcttggatcagttggagaagatctggattcagttcagcttcttccaatccagccttgagggctgtcacgatcgcttgagcagaatgaaaggcgtcctttccagtacgaaggactactgcatttccactcttgatggcaagtgctgcagcgtccgacgtcacatttggtcggctttcataaatgatgccaataacacccatggcgactcgaactttctggatttcaagaccattttccaagacttcagtatccagcacttccccaatcggatctggcaggtctattaaagcacgaattccttgtgccatcccagcaatccgctcttgatcaagaaagaggcgatccagcatgacttcagagatcttgccgcgcgccgcttccatatcgatttgattggctgctaaaattgcttccgtcgctttcaaaagctggctagccatggcctccaaggcctgattcttaagagctgtactggctgtattgatacttttcttagctgatctcgctaagcttaattgttcttgtgttgtttccatacaattcctctaaaattctgtaaagagtagttcaatctcaggagttaccgagatccaatcatcccggtgaatgaggattcccttagcttttttagattggagtagatcgcgcacagctgattggccgaaacggaccttgccttttcctagtaattgaccagtctcttgatgatagacgctgacgatgtcctgataagaaaaatccccttctgccttggtcacaccagaaatcaatagactctttccatgatccaacagggcttgcgctgctccagcatccacccaaacggcacctttgctttctgcataaaaggctagccattgcttctgggtttttaaacccttatcctctgcaaggaagtaactgccatctgcttgctcttctgctgcttcgatcaaggcatcagacttgagagacgagcaaatatagacaggaaccccagactcggtcgcaagggtcgctgccttgagtttagtcagcatgccgccagttccgttgctactgccagcaccaccagccatctcgatcatctcacgagaaatgtgttcgattcgatctaagcgcttagctgttggatcctgagaaggattggctgtatagagaccatctacatctgttaaaagcaccaaaagatcagcttgaaccatagctgcaacctgcgcactcaaagtatcattgtcaccaacttttaactcggcaatcgagaccgtatcattttcattgatgattggaatggccccacggttgagtaagacagaaagagcctggtgggcattcttatagcgacgctgatccgcaaaatcatcctgggtcaacaaaatctgcgcagaaacaatgttgcgtaagagcaggttggctgtgtattcttccatcagtaagccttgcccaactgctgcagatgcttgcttgtctgccaccttggttggacgcttcttaaagccaagggcaccaaatccagcagcaactgcccctgatgagaccaagatcaactcatgacctgattcatgtaagagagccaactgctgcgtaatgaccttgaccttctgtctggagagactcccgtctggattggtcaaagacgaggtccctactttaaagacgattcgttttgctttcatcgctatgattctttctaatactatttatttcgtatgtaatgaaagtgactgaatctccattcagccattcttcattatccttttcgaaggtcttccagcgttttctcaaagatcgctggcacttctgctgtaaattccaaggtctcgcctgtacgagggtgggtaaaaccaagtgtccgtgcatgaagaaactgtcctttccctttgagtgtcttcttaggtccataagcaggatctccagccactggatggccgatataggccatgtgcacccgaatttggtgggtccgaccagtctccagttgtaactctaccagcgtgtaatccccaaagcgttccaagacttgaaaacgggtcactgcaggttttcctttagccgtcactgcttgttttttccggtccttttcactgcgaccaattggtgcttcgatcatgccccgatcgttaggaagattgccatggacaatggcccaatacttccggagagattttttgtctttgagttcctctgctaaggcgacgtgggcttggtcattttttgcgaccatcaagaggcctgacgtgtctttgtcaatccggtggacgatccctggacgcaattccccattgattcctgaaaggtctttgacatggtataagagcgcattgaccaaggtcccactggtgtggcccgcactggggtgaacgaccatgccttggggtttattgacgacgacgacatcccggtcctcatagacgatgtctaagggcagatcttctgcttcatagctgacctcttccacttctgggacttcatactggatgatgtctccttctttgaccgtatacttagcttttttcacagttccattgaccagaacttttccttctttgatctgctcattggctacagctcgtgataagggagtcaaatccgccaaagccttatccagtcgcgcaccggctacttcgattttaatttccatgcgtttcctctttcaacatcaggatcaggagcaagaaaactccaactgtcaaataactatctgctacattaaaaatggcaaaattcataaaatccaggtggaacatatcgaccacaaagccctgacgcaggcgatcgataaaattccccaagccacctgcaatcaccaaggtcaagcccgtcaccatccaaagcgaccccttgaggtgcttataaagataataaaaggcccccaccatcacgactagcgtgatgagggtaaagaaccattgctgattttcaagaagcgaaaaagctgcacctgtgttttgaagataggtcaggctgaccacatggggaataaaagacttaacgacccccagtggaatgttcttgactacataccatttgaccaactgatccagtaggaccaatagcacgattgctaccggaaccattgtttttctcttcatttcttacctcttttgatcaaaatattctaccatgacctcgacaaacttctctgctacaggagagagatccatctcttctcgtttgacatagaccattttattgtctaaattatcttctaaaggaatcacggtaatgccattcactgactggctatccaaaaagcctgatcccgtcgcataagcatccgttcgctccaagattccattcaaggtagcccggtcggtcacattgaacatttgggagctcgagctggtatcgacaaagttctctgaataatagaggtactcatctttttcttgggtaaaacgaacagttggcaactgagctagatcttccataaccagttttttcttcttagccaaaggatgtcctttgcgaagataaatatgagtctgaaatggaatcaaatccaccacttcaagccctaatttatcgacccgttgcataatccccttggtattttgacggttgagataaataattcccaactcactatgcccttgagccacttcgtccaaaatttgaaccgtcgttgattcaaagatgcggaagtttttattttccggatagcggatcgagaattccgtcattaaaggtggcaagaagtcatagtgctgactagaaatagagaattctttcttctcttcttcgggactggcatattgattttgaaaaacatcaaaccctttgaccacgtcttgcgctttttcataaaattccattccccgacgggttaaaaaagtcccagaactggtccgacgaaaaatcttaaaccccagttctttttccagatctctgacggagatagacaagctaggctgactcacatacattttttcagcagcctcacgaaaagtaccactgttggcaatcgccactacatatcgtaattgttgtatattcattctattttccttattacagtatcgatctattataccataaattagaggctgaaagaagagatccgtttaatagaccttcttctagtaaaaataaaaaaagctggaactaaaacagttccagttgatacttattcaatcacttgagtttcagctactttcttgtaccaatgtgcagatttcttaggataacgttcttgtgtatcgaaatcaacatagaaaagtccgtaacgtttttcataaccattagaccatgagaagacgtccattaatgaccagatgaagtagcccttgacgtttgcaccatcggcaatcgcatcagacaagacttccaagtgttgtttcacataatcgatccggccatcatcgtaaaccgtgttgtccacaaattcatctttgtatccaagtccgttttcagtgatgtagatcttcttgtagtttggataatctttcttgacacgcatgatttgatcatacaaaccttgagggtagatgatccagtcccaatccgtccgagggacatagtcaggagctacacgacgtccaacacctttgatttggtatttagagcttcctttttcccctttaccattatggatgatttcagtttcgccgtcaaaagcttccatccagtcactcatgtagtagttaattccaaggaagtcgtttagatctttagctgcttcaagcgctgcaaagtcttcctcacgaagatccaagctaccaccattgacggataaaatgtggtttacaccttccatggttgcatctgaatagtgtccaagataggttgcatctagaataaacttgttatggatgatatcttccaactcagcagcacgaacgtctgcaggatttttaggatccaatggatacttagttggaagggcgtgaacaaccccgatttcaccttcataccctttgtctttgtacaatttcacagcacgtgcatgagaaaccatcatattgtggtgagattggaagactttggcaaggtcatattgaatacctggtgggaatttacctactaagtattgaccatcaccgattggtccaatttcattaaaggttgtccaatagttgacttctgggaattcttcaaaacagaaggccgcataatctacgaagtgttcgatattttcacgattcaagaagtctccgtttgagtgaagagcttcaggagtatcaaagtgatgaagagttacgaatggttctacatgacgtttatgacattctgcaaataacttatgatagaattctaccccttttggattgacttcaccatatccagttgggaaaatacgtgaccaagcaatagaaatacgaattccgtttacgccatattcttcagccaactgtaagtctaccggatatttatggtagaaatcacttgctggttcagcagtataccaatagttgtctgctaagtatttgtcccatgcaacaggtcctttaccgtctgtatgagtcgcaccttctgcctgataagctgcagttgcgccaccaaaaataaaatctttaggaagtgtttttgtcattttttcacctatttcttgattagataaaatgaaaagtgaggggagaggagttagtgagccatccatctccatctcactttttagttcttattcttcaaattgctcctgaacaaatgccagagcaccttttccatcacgggttaacttgatgtactgagcaccttctgtcttagccaatttgattccaagtttatctgtttcagccttcatatcttcatagtttgaagctacttgaggagcaagaataacaaggtcaaattctggcaacatttcacggtgggctccatagccacctgctgcagctttaacaggaactttatactcttctgcggctttattcaaagcattggcaagaagaccacttgttccaccacccgcacaaagaacgaggacgtttgtttcttcagtaattgtattttgtgctggttctactccagcttttgcaagaatagcatctgcttttgcagtgttaaagtttgcagctactttttcttttaattcatcattagctttacctgaacgttcttcttcaagaatttgttcatcataaaccttgaggaatggatagtagatagcaatatctactacaattaacaatgctgcaagagcgaatgataagaactggaagtttgtaccaagaacaataccaagaggtcctggtgtagtccatggaaggttggcagtaaatgagttcatgccaagtgtttcaataaagaacttaaagatccatacgtttgcaattggtgcaaagatgaatgggataaagaagattgggttcaaaacaagcggtgcaccaaacaagattggttcgtttacaccaaagaatgtaggaactactgaagcgcgtccaatagcacgatttcgttttgacttacatagccacataaacatgaatggaaccacaagagttgcccctgtaccacccatagtgacgataaacatttgtgtaccagatgtaaggatcttatcagcgtgcataccttgttgaagaaggttcaagttgacttcggcatttgcgtaagtaatcgctgcaatcgcaggctcaacgatagatgggccatggataccaataaaccagaagaatgcaaaggcaccgaaaatgatcgtaataccgacataaccatcagctgctgagaatagaggagcaagaagggtaccgattgattcagcaaccgttacatgaaggcttgctttcacaactaattcaagtgcatacaagagtacaactgacaatgtaaatggaatcaagtctttaaatacttgtgaaatatttggtggaacctcgtccggcatgcgaatcgtcacattatttttcacacagaccttataaacattaactgtaacaaaggctgcaatgaaggctgtcaacagaccttttgtacccatgaaggctgttaagaatccaccttctttagcaggttcggcagccatgagcaagaagccaaccatagaagccaacattgtagaaatgaagttgatttggttggttgctgggaggtcacggttcattgaatcagtcaaagccttagccgttgtcccaccaacgaagaaggccaagatgcccatagaatagctatatggagtcatcaagaaagtttcaatatctttagaccaatggaatccccaagcgtttggtacatacgcaattaggatgaagatagatgagaagaggatcacaggcatccctgcaataaagccgtcccgaatcgctcgcaaatatttgtttcgagaaatcttttcaaagaaaggtttccctttttcaattagttcaatcagtttattcattatttcgctcctcttttatatagttcaatcagatggtgaatcacgtcttttaataggatcgttgtcatgagatggtcttgaccatgcatcatggtaatgctataggggatttcttctcctgctgcttcatgcgctagcatggtcgtttgagatttgtgagcctcagcgatacaggaccctgcttcttctactaaggattctgctttcgcaaaatcaccattttcagcagcttttaatgcttctatcaattttgatcgagcgtcaccggcataagcgacaatttcaaacccaagtaattggacttcttctttattcatgttggttcctccttatgataccttttgaaaatttttataatagacgttgaatatgaagagctaaatagactttttcattaggagatattttggctcctgtctgttcagcgatggtttggtagatttgatgactaatctcatgagcctttggataacttagctgaatcagttgttccatctcgctcaaaccttctggatcttctcttcccttatctagcgaatctaggaaataattgagatggatcataaagcgatcatagaaatgactgttttcttctttccgtttcaatccattttgagctagtttttcttctacagctttcaaaataacttgtcgatcctggacatctggatcttgctcatgaatcatttccccttgtgcattaatgaaatgataagcgatacgattcacttcatcgtcaggaagttgatccaagagccgctttcgaaaaatctcaatcgcttcttttgcgattttatagggaatcgggtgcatagcagacgcatcaggaaggtcactgtgtttgtatcttccctgttgaactgcctggtaagaacaaaagatgtgatctgttaatgtcacatagatatattcttgaacaggataggcatatttcttagacaaggtatcaatcacttcataagtagttgtaatgaaatcaagaggaacatcctttagaagggccataaagttttctcttgactcatccgtgtttaaacgaaatactttttcgaccttatcatcagccactagatcatttttctttttcccaaaagcaatcccactcccaataacaatcaactcttgttgtagttcattttgaaccaaagcaacattattgttcattggatggataatacgatacatgaggctctcctttgtaaaatttgttaaaagcaaataaaaatgaccacgaagcaactgaaaaaactagcctacactaattgttcaatctacttgtggtcacgcctaatctaacttagtaacgctcactgctattcaacttatgaacttattctatcataagttttttgttttgtaaacccttacagcgaaaatttttaaacattttttataaaaaataaacaaagcctaaaaataatgaagaacattggaaggaatttcttccttccaatgttctaaatgttgctttaggaggcaataacgatttgtttcttacacgcgttctgtccaaggtgttgccactttagccaagactgcgttcaattcttcaatattttgacgaccttctgtacgaagccattcacgagcagctgcttctccatctttgatgtaagcttctactgaacctgcccatgtcgcacgtccacaaagaacaccgttgaagttggcacctgatgcatgagcaaattccaaagtttcttggaagagttttgcggatacaccagcactgaggtagatgtatggaagatttgttgcttcttcttgttctttgaagaaggcagccgcttcttcacgactatagacaacttcaccttctccgaatccttccacgtagttgacattgacaggaacttctactttcaatacatcaatattgaaacgaggatctgagaagactttcatcgcttcaatgactttacgaggtttcacttttgcatattcagcagaggttgcatctgcaattccttcgtcataagccaagatttcaaggaagaatggaatgtcttctgccacacattctgaaccaatgcgttcgatataagcttgtttttcttggttgagttcttctgcactatctacatcatagtagagcaagaatttcacagcatcagcaccttgttctttaatgcgttttgctgaccaaaggttgaggcagtctggtagacgtttggtgctagatgtatcgtaacctgttttttcgtatgcaagcaagagtccagcatctttgtccaaggctttcgtagcaggcaaaccatattctgggtccaacaacattgatgaagcatattttgtcaattcatctgctacaagaactttcaattcttccatttgtgctacagttggctcagtgtcttggtatttggccatcaagcgtttcaaagccccacgttggtcgaaggccaaagctgaaataacaccgtcttttgtactaagacgttccaaatagttgcgtttttgttctgttaataccattttatacctcttttacgattaattgttgatacaaggcatcatagtgccccatgttgacatgtcctgtttgtgcttcttgcgcatttaacattccaagaacatttgctttcttgagcaagtctgcgtcactctcatgatgatagagaccagatgcaatccctgcaacagtcgaatcaccagatccgactggattgacgacatcaatcttaggaatatctaccttatagaagacatcgccgtgcttcgcaaaagcgccatttgctccaagagagactatcacccattcgatgccctcaaagagagcatcctgaagaacttcttttaagtcttccacattcttactcacttcttttcctaacaattgagacaactcttcattgttaggcttaatgactgtaggcttgacatctgcttgaatggcagcttctaaagaagctcccgagcaatcgagcacgactggttttccagcttccctcgcaatcttgaccaggctagcataataatccactggtaaaccagctggaagactacctgagatcgcaaccacttccacttgatcgatcaagtgacggtaatgttgaaggaaaccttgcccttctttctcagaaatggttggacctttttctaagatttctgtttgcttgccttcgtgaaggatggcgatacaattacgtgtatcaccagcaatctcaaagaaacgttcctctattccttctcctaaatgatcgagaatgaattgacccgttcgaccaccaagtaggccggtcgctgctactggatccttgatctcagaaagtacacgggtaacattgaggcccttcccaccagctgtcttactcacctcagccactcgattgactgtatccaactggagtacatccaaaggataagagatatcaatcgaagggttcatcgtgaccgttaatatcatatgtcacctcttagtcgtggtattcaccacggtcccatttttcgaggaattctgtaaagaaatcagcatccgcttgatgggcattatgggtttccacatgttggatcttagcgatcaattttttattttcttcagttggtttgtattcagcgtgaataaatgcttcaatgatatcgcacatgagcaattcaccagtaattttaccaccaaaaccgatcacattcgcgttcaattcttctttagcataaagagcagttgtcatatcgcgtaccaaggcagaacggataccaggtactttgttaacagcattgttgatcccaacacctgtaccacagatacaaacaccaagatctgcttggccacttgctacggcttcaccgacttttttaccaaagattggatagtgggtacgtgtatggtcataagtcccaaagtcgagcacttcatatccttttgatttcaaaaaatcagaaacagccattttttcatttgtcacaatgtgatcacaaccaattgcaattctcatttgaattctcctctcattagcacatcttattcaacatatcgacacggatttggtgacggccaccgtcgtatttaccattgacgaagcctttggcaatgttcttagccaattcatccccaacaatttcggcacccatggtaatcattcgagaattgttgtgtccacgtgtcatataagcagatcgttcatctgaaacttctgctgctaccattcctttgattttagttgcaaccataaatggaccagcaccgtaagcatcaatcacgattccaagattttgatcgtttttgttcacttcgctggcaactgcaagtgtcacatctacaaaatcttgaccttcagcagttacatccacaacatcgaagttttcttttacaagaaactctttcacgagatcttttaatcttaatcctgcagcatctgcaccaattacaatagacatgtcctgtcctccttttgttcgtttcagcaaatatctctgttgttaaattttcacaaagaaacattttcttactttttatattatattacacctattttgaacgaaagtcaacattaaattgtttattttcgaacattttttaaaataaaaacaccatatccacaaaagatatggtgtcagttttcaaactacatatgacgattattttgcatttgcagcatattcttcgttacgtttgatcatttgttttctgtaccaagcgaagattccaatatagaatgccaagaagacaactacaccaaggattgctttgatatcaccagttgttgcgttaccgattgtccaaccgagcaatttttcaactggtccttcaagtgttgagtgagtgatcaattgagtagaagctacccctttagggaaggcatcaacactcttagccaattgagttgcaaatggtgcaatcaatgttcctgaaagaaggaagagtggcaagagaaggcttccgaagatgatcatacggatcaatttaccgcgtgttacaaccaacaaggctggagtcacacccatagcgatgatacctgcaagtggcaagataccatttccgactttagaaagaagcactgcttcaatcaacatgattggtgcaagtacgttggcacaagcccagatttcagcacgaccagcgataaatggccagtccaaaccgatattgaatttacgtccttgaagacgtttagtagcaacgtttgtaataccttgtgacaatggttctaccgctgcgatgaaccaagaaccgatcaatgagaacaattccaagcagacaccggcagtcaaaccaaggctcaaccaacctttaataaccaattcccatttgtcagcatcttgcacgccagcaactggatgtggagtacccatgataccgatgacgataccaagaaggaaaccgataaagaatttagatccccagaaaccgatcttcttgttcaatttagctgcgtcgaagtcgtatttatcaagacctgggaagaatttgtcaaagattttatccaagaccatgatgattgggttcatcatgtagttcatgtgagttgaagtcataggtgatgaacttggtgcattcaaaagatcatcaaatgttggtttcatcaagtctgagttgatgattttcataatccctacaaggacaactgcaagagttgccaagaagagtgataaaccttggctgacaccgttgttgtctgcataccatttgatcaaaagaccagtgatagacaagtgccagatatcgaagatatcgacgtcaagtgtatcagttttcttgatagcaagcatgataacgttgacgatcaacataatcaacaagaagtaaagtgtccaggcagacccccaagtgatggtcgcaagaggtgcccaaccaacgtcagtgatattcaattgaatacctgtgttctcaacgaattttgcaagagacgctgagaaagctccattcaacataccgatgatagcaccgataccagtaagggcgatggcaagtttaataccaccttcaagggctttagagaatttcactccaaacaagagagccaataaagtcaagacgatcaacatgatgatcggagcacccatgtctaggatgggtttgaaaaatttattggcaaaatcaataatgccattcataataaatcctcccgatttataatttgttatattaggctttaatcgttccaaattttatcattggataacgcttacaaactattttaaaaaaatattaacttaatccatgttctttaatggcagcttcgatgttatcaaagactggcgcactcatcgctggaatacggaataaaattggaccagcttctaccactggaataccaggatcaaatcccaaatcagttgcagcaattggagtaaagatatcataacctgaaatcaaatcttcattgacatctttgaccatgacagcgtcacaacgcacatcataaccacggtttgacagttcttcttccaacgcactcttaatttggtggctagagttaacacctgcaccacaggcagctaaaattttaatcatttggatgtcctccattataaatatttacgaatgttttaggaaatagtttccgttatgtattgataaagcttaccttcactatctaattttgatagagcttcgagatttccattggatgtaaagaaatccatcagctgagccaaaatattggtttggctagagcttgaattgttgataatgaagaataaaagtgaaacttgaacttccttatctggagcaatcatattatggaaggttaccggttgatccaaacgaaccacgaccacattctcagtgagattatggacaatgtctgtgtgagggatcgccacatttggtaagtccttaccaagaaattccatgtctaatccagtcgggaaagacttttcacgctcaatcaaagcggaacgataggttggtgtcacaatctgtcgctcttccaataagcttgctacctgctcaaagagatctgtttgatccttggcatgtaggcaaaatacaagatctttgttaaagagttgatttaatcccattgttgccacctccttatctaactatttatttatagcttcagtatatcactatattgattgattgtcaatcattttttgtctaaatttgtttaattttgtttgtatatctctctaaagcgcttcctaaccgtcattttctaacattattaaaaaagtaaaaagtgagagtgggacagaaatcggtaattcgttagaattcgatttcgtcgtcccacctccgcacagttgagtagggctgtaaaagctgatgaaatcagcgtagtagagcccactcaaccactgcgtcttgctcgataatccaaaaataattgagaggctaggacttttgtcccagcctcactttgttttatatgattttcgtatacaagccgtatttgtctttgatcttctttggaatactatcatcggtaataatggcattcaggtcttccactcgatagaaactatagaaagaatagctatcaaacttactgttatcagctaccacatatttctctatcgcattgttcagaataatggcattgccatttccttcttcttcattagctgtagagacactatgaccatcgattccattgaccccgataaaggctttagaaactttgatttctttcaagagtttattggcaaattgaccgacaaaggtttgtgtctttacccggtagcgaccaccaactaagatcaaatcgtaatttgggaaatcctttaatttctcaaaaataggtaaagaattggttacaatactgacatccttgccttctagataatcaccaataaagtctgttgtcgtgccagacccaataaagactgtatccccattttcgattaactctgcacattttttggcaattgttcgtttctcttcaatattgatcagatttttttcactgtgagaagcctctaacaaactatcttttacctttttgtgggccccaccatgcacgcgaactaaaaggccttgtttttcaagatcgatcagatcgcgacgaatggtcatgtctgtcaccccaaagagttcttttagttctttgaccgataccacactttttctatccagttcctgaagaatttcaacatgtctgctatctttcatgctactacttccattcctactatatttgtctctattatactactttttcaaaaaaacacaaattcaaacattatattaacaagagcaaacatgatatttttataatagataaaagaaaaaagccttccgtcaatccggaaagctttgatttatgctatttctagcttcctcacctttggatcaaggctcgggataaaaaggttcactgaacctttttattttgcgattgggtaaacagaaacttgttttttatcgcgacctttacgttcgaagcgtactacgccttcaacttttgcgaacaaagtatcgtctccaccacgtccaacgttcacacctgggtagatgtgtgtaccgcgttgacggtaaaggatagatccacctgttacagtttgtccatcagctgctttagctccaagacgttttgcttgtgaatcacgtccgtttgatgtagaacctccaccttttttgtgggcgaaaagttgcaagttagcaagattcaatttcaacataattgttttcctccatgttagttttctgtgataactcttgtttggacgaactctgaagagttctccgataagtttgccatccctaagaaaaatgattcaaagaatagttgggtcatttctctttgatgtggtggaatatctgtcgggattgtgacccgaaggaagccaccttcttcttcgtttaattctagatccggttcgtagcctgcaaatttctcaacagagttgacaaagttaatggctagagtcgaaaccgatgcacacacgacatcaaagccatattcaccgcttccagcgtgcccagtgatttctgcactcctcagctcgccatcttcggctcgttcaaagactgcttgtatcatgtgttctcctaaaaattaagcgttgatagcgttgatgacaactttagtgtaaggttgacggtgaccttgtttacggtggctaccttttttaggtttgtacttgtaagtaacaactttcttttgttttccttgtttttcaacagttccaacaacagtagctcctgaaacaagtggagttccgacaacagtgttttcaccaccaacaagaacaacttcgttaaatgtaacttcttgaccagcttcaacgttcaatttttcaacgtagactgcttgaccaacttcaactttaacttgttttccgccagttttaatgattgcgtatgtgctcattatgcacctcctatgtatttttgggtttccccgtatttttgtgaagactcgcctagcatcgtgggacgaaccacttactctcatggaaatgagcgacgatgttcgagcggttgcacaggcatgtgcatagtcaactatctaagtatatcacttctatcagacaaagacaagtatttttgcgctttgaaagcgaattttctttgaagaatctattttttgtatcttgcagtttaagatcgcattcaaaaccggctttcatctacttatccttaaatttaaagtcattgaagctcattttggctttagacgaatcgttcatccccttcattttttcttcttgttccttagtaatttttatcggaatcgctgcagcattattgggttttaacacacccgattcgctcacttcatagtcaactgtgacatctttgaatagtggctctccatcatattccaaattcaggacaaaggatccatcacgatcgatggttgtggtggtacgattcacaataaagaataaggcgaagcgattttcctcatttccaaaggtatatcctggaaaaaagacaaataattttccagcttctccaagcgttggatgttccttgataaatttctcagacgcttccaagacttcgttgtcctggtctttatactggtcggctctgacaaatgtgaggggttctttttttctattgcttgattggctagtcttctcttcttttttcgggccagtaaacgatactttgacacagcctgtcaacagaagcaaacttgtcattaatacgataatttttttcatcttgtctcctttaagttggttagaaaaagaggctggatacgcccagtctctcctatagcaaatcctcaatcaggtcatcaacctcgtctttttctacttttggtgtgatctctgttacgatgatgcctgctacagctcgctcaactaaggcttccacatccatacgttgctcatactgctctgcatttttgagtttcggattagtctttggacgatctggtgcaaagatggtacaacagtcttcaaacggttggatagagatttcaaaggtatcaatctcttgggcaatatcgatgatttccaacttgtccatggtcaccaccggacggataactggtgtattggttaccgcattgatggcctgcatactctctaaggtttgactagccacttgtcctaagctttcaccgttgataatcaccaaaccaccgcgaacctcgcgaatacgatctgtgatgcgcatcataaagcggcgtgtcaaggtcatgagataagcttccggtgcttttgccttgatttcctcttggatctctgtgaagggcacttcgataaattggatattgcccccaaacttggtcaacttccgtgttaagtcatgggcttttttcaaggcacctgggctggtataaggggggctcgcaaagtgaaccgcctcgatatccaccccacgcttcaaggctaggtagccagctactggagagtcgatcccaccagatagcatgagcatccctttcccagaagtcccaactggaagacctcctgctcccttgatggtttcataagagatgtaggctgcttcttctcggatttcgacttgcagattgatatctggctttttcatctgagcctgaatcgttgggatggcttcaaagacagctccacctagggtttgattgagttcacggctatcgagctcaaaggtatggtcactccgcttacttgagattttaaaggtcaagccttccttgtatatctccttcataatcccttgcactgccgcttttaaggctggtactgatttttcaatcttgtaaacaggtgaaaaattttggattccaaaaacttgcttgagggattctgccaccggctcataatccgtcccatgtagataagcatgggcccgatcgcggtccgctgtcactttgacagccggataaatagataaaacatcttggatattattgcgaagtttattgatgaaacgcatgcggtttttccctttagtagaaagttctccatagcgaatcataatttctgaataggttaaggtcatattgatttccttctatatttaacgtacttttcgtgtttgttcgtaaatcagtttgaacttggtcaagaattgctcgacttggctcatgtcattttcaatatcgagactcaagcgaacagctgtctgcgcaatgctcttgtccactcccatggcaatcaaggtaccagctggttttccagccttagaagagcaggcactagtggtcgagatgtaaatatcaaactcttcaaaggcatggaccactacttcaccacgaactcccttgatcccgaaagtcaagatgtgaggagcaaagtgatcctcaccagaaaagacagtgacatctggatagttggccaattctttgcggatcacttctttcatctgctgggtcttgctggcaaaagcttcttggttttccatagctaagcgtagggcttttgcggttgctgcgatacctgccacgttctcagttgtcgagcgcatttctttttcttgacctccacccgttaagaggggtgtgatctttttgccttccttgatgtagacaaagccaactccacgaagaccatggaatttatgactagagaaggtcgcaaagtccactcgctctggtagataaacttctgttgctaccttggctaaagcttgaaccgcatcgacatggaaactaatcgttgggcgatcctcaaggagagccgcaatttcatggatgggctggatggagccaatctcattgttgaccgccatgacagagaccaaggtcgtatctggacggagaagactagccaaggcatccactttgacaaagccacgcgcatccactggcgcataatccacttcgaatccctgcgtctttaaccaagcagcggactccttgatagccggatgctcgatgtcagagacaatgatatgcttaccataaggagctttctcaaaggcgacacccttgaggacccagttgtccccttctgtcccaccagacgtgaagtaaatttctttagctttcttgccaattaactctgcaatctgttttctagaagcctctaaaatacgagtagcttgactacctagattgtgcaaactagaagggttcccccaaatccgagtggccacttctgtataggtcgctagggcctctggatagggtttggtcgttgctgaattgtcaaaataaatcatgtcctacgcatccatcactttctttttacgtaacttctattttatcatttctaaccgcttgggacaaggatttgataaagagagatgaggtaaaatcactccataaaattcagttctttttagacatttttcagaaaatgacttataataggaaagtgttaaaaacaatttttgatagaaagagaatgaacatgtcacaatattcaagaagcaacaaaaaccaaaaaccagaggatactacagattctagaccctcacgtggtgaaaaagtcaaacaaggcctatcactatttcaaacagttgtcgccacgattgccagtcttttagggattatcgtcacttcttttacgattataagcctgcttaataaagacaatcaaaaaacagaagataaaccatctagtagcaccagcgtcgtcgtggtccacgataagggatctgactcaagcgctaccaatacagatgctaataccaatacgcaaaccgattcaagcaatacagaaacaagttcacaaaaagaaaccgatagctcatccgctacagacaccagttcatctgcagcacaagaccaaggttccacagcaacagacagtggcgcagatacagcatcatccggaaccaactaaaaaatcagtaaggacaaccttactgattttttttagcttttgatgtcagcttttattgtagtatttattaaataaaataagtggatcttactcatttttttcgtttttgataaactccagtaaagtcatttagatattctaataaaataactaattcaataacattgactacaaaaacttaaaggttttaaattttccaactcttactcgatataatcacccttaatactaatatgttggcccatactgaatgtcatcttttgatcagaatccaatacgacatccaccctccatcctgaatcttcaagttgattgacggtgccaaaaatttctacgacctcatctccaccttgtggtgtcccatttccaccctcaatccattgcgtttcgtcccaataaatttgaatagattcaacctttgaactctttgatttcacaaaatcgacgatttctttttcatgttttttgaggtaagcgagctgtttttgtttaaagacttctgtgtcttctttaattgatgaggatgcgacaattttctctcgtctggtcttttcacgttcttgcttcacacatccttctagatatccaagtgttgaaatgaaagtaattgtgatcaccagattgtttatttattttttcataattttatttcgtttaaaactgattcctctattgcaattctcattatctaacggacggatcatttcttttctacccgatataaattgtctgaaccaattgaatctattttaggcatcttattttcgtctaaggtaaaattcaggctaaaatttgttagatcacctccattggcataaccgaatactaatagtatttcatcacctccctgaggtgttccattacctcctacaactgttttaatactgtcccagtcataagacacctgcgtaatgttagcattatgtgctttcacataggccgtcatttcttgctcgtgttctttcagataggcgagctgttttggtttgatcacttctatatcttctttggtggaggaagaggtggcagtttgtgcttgtttcgtttgctcttttgaatttatggtacatcctcctatacttgcaaggagagctaatgtagtgattaatttaaacgccgtttgttttatcatgtgctatctttctctaaaacagttctttttcaaaatgtattgtacttacttaggaaataggttttccgccaatcgtaggttcatggagcataaacatttctcgcatttcaattgactgatcattattaattggaatatctattccccaaccagaatcgtcaatatgattaatgccaccaaaaacatttatataatatttgggggttgtgagaccaccatcactccattgcgtctgatcccaatcgatctgaacggattcaattttcggactttgggctttcacataatccacgatttcttgctcatgctctttgagataggctacttgctctttttttatttcttcttctgatttctgaactactttctttgaagaagaggccgttaccttctgttctggtttcttggtcatgttcataatctttcctccaagaagtagaaggcctaggatcggtaacagaatgatcaaaaataattccatttgtctcttcatctcttctactccaatcgttccattcatgactgaatgggccagtcactttccttactattatagcatctttcatttgaatctcaatctaactcactagttagagcttttataaggtaatcaaaaaggaacccaaaggttccttttgtgttatttccgatacatcttgacctgaaggtaaagatcgttatagactccaagcaatttcttgcctaattgttgatagacttccaaatggtccagcgtttcatcgcttggatagaaggattggtcattttggatttcttttggcaacatggctttggcttttttatttggcgttgagtagccgacataaagagcatttttcaaagcatttttaggacgaagcatgaagttaataaaggcatatgctgcttctttatttttaacggtttttggaatgacaatattatcaaaccaaaggttgctggcttcagttggaacgacatagcgaagatccttattggcatccagcatttggctggcttctcctgagaaagtaaccccaatagctgcattgttttggatcatataccctttcatctcatcagcaaccaaggctttgatgtttggcgtcaaggtgtagagtttatctactgcctcttgcaatttctttggatccttttcattgaggctatagcccaaggtattgagaccaattcccatgacctcacgcgcaccatcgtacatcatgatgtcatttctgtactcttcacgccagagatccgaccaatgttccggagcatttttgaccatcttcgtattgtagacgatccccaaggtgccccagaaataaggtacggaatattggttgcccggatcaaacgattgattcaaaagttttggatcgatattttccatccctttgatcttggattggtccaacttttcaaccagatgctcatccatcatcttggcaatcatgtattcactaggaatcgcaatatcgtaggtggttcccccttgcttgatcttagtgtacatggcttcgttggaatcaaaggtatcatattgcacctgaatccctgtctctttggtaaattccttgagcaattctggatcgatataatctccccagttgtagatgaccaacttgtcactattcttggtattcatgctcgcttcgatctggtggctaattccccagaggaccagaatgacaaggacaatcccagttaggaatgaatagagttttttcatgccgcttcctccttttcacgggtgataaagtaataaccgatgaccaagagcacactaaagagaaagacaagggcggacaaggcattgatactgagggaaattccttgacgcgcacgtgagtagatctctacagacaaggttgtaaagccatttccggttacaaagaaggtcacggcaaagtcgtcaagcgaataggtaaaggccataaagtagccggcaataatggctggtgtcagatacggcaacatgatctctttgagcatttgcacttgggtagctcccaagtcataggccgcattgaccatatcccggttcatttccttgagtcgtggcaagaccatcaagaccacaatgggaatcgagaaggccacgtggctagccagaacagataggaaacctagctggtacttcaccgtcgtaaagagaatcaagaagctggccccgatcataacgtctggtgctaccatgagaatgttgttgatggagagcaatggtccttctaactttttcttggattggtagatataaatggctccaaaggttccaatcactgtcgcaatcaaggctgacaagaaggccaagaggaaggtctctgataagatcagcatcaggcgactatctgcgaacaattcattgaaatgctcaagcgtgaagcccgtgaaggcattcatatctccccctttattgaaggcataaaagatcaaatagaagatgggaagatagaggatcagaaagacgaagcctagatagaaatgagatacttttttcatcgttctctcctttctctagttgcccacatggtaaagagcatggcaaggatcaaaacaactccgatggtagaacccattccccagttttgtgttgtcaggaagtgctgttcaatcgcagtccccaaagtaatgacccggtttccaccgatcatccgtgtcaacatgaagaggctcagactaggaataaagacagattgtacacctgagcggactccattcatggacaaggggaagaccacatgacggaaggtatcccaacgattggctcccaaatcatagctggcattgatcaagtttggatctaagtcatctaagacattaaagatcggcaaaatcataaaaggcaactcgatgtagctggctacaaagataaaggagaaatcggtaaagaggatctgctggggagcgactccgagaaagcttaaaaagctattaatggagccgttttgcccaaagattccgataaaggcataggccttgagcaagagattgacccaggttggcaagacgatcaacattaaccacaactgccggtgtttgagcagcgtcaaaaagtaagcagttgggtaggagatcaagagcgtcaccaaggtgacgattccggcataaaggaccgaattaaagctcatctttaaataggtcagattttgcgaagtaaagaactctttgtagttttcaagtgaaaactgcccttcaacgttgaaaaaggattgaaagatgatcatgaccacaggagccaagacaaagagaaaaatccacaagaaataggggaggataaatagattagaggttgttttcttcatctctttcctcctcaatggcattaatcaaaccagcttcttgctcttccacttcaacgtactcttcgatccgcgcatcgaattcttcttcggtttcattgagacgcataacgtggatatcttctggttcaaagtctagcccgatgacttctcccacgatggccttacgagtggaatggatcatccactcatttcccaaatcatcataggcgatgatctcgtaatgcacaccacggaagagttgggtgtccaccttcacttggagcttgccttcttcaggaagggtgatttgcaagtcttcaggacgaatgacgacttcaactggttcgtttggacgcatccccccgtcgaccgcttcaaagcgtttgccattgaactcaaccaagtagtcctcgatcatgcgcccatctagaatgttggactccccgataaaggtagctacaaagtggttgatcggttcatcatagatatctactggtgtaccagattgaacgatctctccttcattcatgacaaagatccagtcactcatggcgagagcttcttcttggtcatgggtaacaaagacaaaggtaatccccaagcgttgttgcaattcacgcaactcatactgcatgtctgttcgaagtttcaagtcaagtgcagacaagggctcatctaaaaggaccactcgtggttcattgataatagcccgtgcaatggctacccgctggcgttgaccaccggataatttttggatcgaacgtttttcaaatcccgctaactggaccattttcaatacttctgaaacccgacgttcgatctcagccttgtccacctttttcaaacgaaggggaaaagccacattttcaaagaccgtcatatgcggaaacagggcataggactgaaagacggtgtggacatcccttttgttggtagggacatcattgatccgttccccatcaaggtagacatctccagttgtcgcatccaaaagaccggcaatgatattaaggatggtcgattttcctgatccagatgcaccgagcagggtatagaacttcccttcttccaattcaaaattgatatcctttaggacaacggtaccgctatcttcaaagacctttgaaacatttttaaactcaataattggttttttcaattcacataaattccttctttactgcgattagcaaactgcttttcaaacgaaaatgcagcggctgacaggaagacctgtcagaccaccaatacctctcggggacttactagactgccccacctatttacggtatcgataggcactcaccccctctccgactgatgctatcgatggttcacaatcaattgttcttcaatacttaagctcttaggcttggccgataatgcgaacttctggttctaaacggacgcctgagtgagcttctactgcctcaatgacatgggcgatcaaatcttcgtagtccttagctgtcccattgtccacattgaccataaagccggcatgcttttcagaaacttccacaccaccgattcgatagcctttcagacctgcttcactgatcaattgacctgcaaaatgaccgacaggacgcttaaagacagatccacaagaagggtattcaaggggttgtttcaactgacgaagatgggtcaaccgatccatctcctgcttgatcgcctcgtgattgcctggagacaaagcaaatttggcagagatgacaacagcaccagtctcttgaatcttagaatgacgatagccaaaagccaactctttcgccgacaaggtttcaatttccccttccttggtcaagaccttacaagatacaaggacatgagcaatctctcccccataagctccagcattcataaagacagccccaccgacactgcctggaatgccactagcaaactcgaagcctttcaaactatggtgcaaggccacatgagtggtgtcgatgagtttagctcctgcttctgcttcgatcacataaccatccacactgatgtcacgcaagcgatcaaacataatgacaaatcccggaatgcccccatcgcggacaatgatattggacgcattgccaagaaccatccatggaatttgctcttggttggcaaatttgacgatgcgttttaattcgtattggttgcgaggaaaagctaaaaattctgcattcccacctacctttgtaaaggtataatgttttaaaggttcttgaaaacggatatcaatcccttcaagaatttgatttattttttcattcatctttctgtctgttctctctctataaaatacaaactattataccaaatttttaactatttttcgaccctaaaaaaaaaagaaggcctataatattcaggccttccttttatcatttactatgcaattttacgagcaatggcacgattcttttgtccatccagagctgatttgaccgaaatccaagcaccaccaagagtgaagacagctaacattcctagattcaagtaaaatttatctgggacgtcccctgagaatgtcgcttcatttagaagcgtccacgacataccaaatggcaaatccagttcactcataagcgccaaagtataatctaattggttgaccaaaaagacggtcaagaccatcaaaatagctgaaactaccacaccttttttagtcaatttcttaccaaggatctcataacctttgatggtacaataaccgagggcagcccctgctaaaacagacacatagccgagacgcgctactaagagggcaactgctccaccgatgattacaccgatcacagcccctacaatccctaaaaggaagttttcttcccgcgcttcataagcctcaactgtatcttgcacttcggcttggtaagctctaaaggtttcatcgtcgattaagaagatcgcatctccaatttgatacagaccaattggtccttcctcacccgtttgcgcattcacttgcacaaattggtggttgagtaagaaatcaacaatatcttggatagctgtccataaggtttcgacagccttccctttggtcattccacctttgacaacgatcgaggtcaagtaaccatcagaagagatagcattaatggcttttgattgttcttttaattcattccaaagaatttcactatcttcgatcaagtctccttcggaaccttgtttcacactgagtgaaatggtaaatacattcttggtttgagcgccttcaatgactaacaagaagccttcacgctctccatacatcacacgggcttcgccatcaaattgcagcccaagatcggtagcaatactatataaatattctggtttcatgtttccccctaaactttcgggaaagcttgagcttttccccatacaattctcattctaccataggagaagcaaaaaggacatatacattcgtatacatccttctttcatttgtgttacattgaggtttatttctcaacacgaacgccaaaagtgtcgattttaagttggaaaatctgaccttctagcccgattttttcaagagctacgacaaagtctgctgaatgctctggagctaagaggttcatgatcgttgggcctgctcctgacagataggtagcgtaagccccatgcgaatgcgctacttctttgacctgagggaactctttgacaagagattgacggtagcgctcatggaaatgatctgactcgatggagcgacctgccgtcaccaaatctcccttgagaagagctgcgatagcgacattggctacgctactagctgtaacagcttccttataagaccattctttcgggaggacattgcgactatcactggtcttcaattggtagctcggtacaaaggccacaaggtcacagcttgggaagtcagccgtgacatattggacgtcttcgccgatgtagctcgcaatgaccatatttccaaagatagctggagctacattatctggatgcccttcgatctcggtcgcgatgcgtaatttttcagcgtctgatagctggagcttggctaattggttggccaattcaatccctgcaacaatgaccgagctagaagaacccagaccacgcgccaaaggcacttcactagtcatcttgatccgatgaggctgcatatccgttgagatagaaagggctgttgagagcaagaggtttttctcatccgtcggaatccctgctccaagatcatgctcaatgaaccaatcatctgctggttcaaggacttcaatggtcaaatagcgagtcacggcaatccctacagaatcaaatcctggaccgacattggcactggttgctggaacaataattttcatgcttattctcccaagactttaaaggtattcaagagttcgaaattcgcctctgaatccaatttttcaaccaggttcttgaattgggtctggttgacttggtgggtaatgatgacgacacttgcatagtgaccatctgagtcttcttggaggatttgcttgaaggaagctccttctgcattaaagatctccgcaagacgcaagatttgaccagtcgcatctggtgccttgattgagaagtaataattgttcttcacgtcttctggtttagccaattgaagagggcgactgtattcattgaaggctttaccgattgttccttcttttagtcgacggacaatgcgaacgaggtcggctacgacacttgtcgcagttggtttttgaccagcacctggtccatagtacatagactcaccaataccgatggattccacatagaccgcattcatgacatcattcactcctgcgagtggatgttgttttggaaggaaggttggtgttacttctgctgcgatccctgactctgtttcaacgatggagccgacaagcttgatgacatatccaaggctttgagcaaccgatacatcttgaggagtgatttggctgattcctttgtgacctacttggtcaaattggatattcattccaaaagcgaactggctcaagatcaccatcttgtaagcagcatcgattccttcaacgtcgttggttggatcactttcagcgtaaccaagacgttgcgcttctgctaaagcatcctcataagtccagccttcttcgaccattttagtcatcataaagttagatgttccattgaccacaccgagcactttagtcaccttgtcggaagcaagggaattcaccaaggtccgaaggattgggatcccaccagctacggctgcctcataataaagagccacttggtgttttttagcaatctctagcaattcgcttccatggacggcaagaaggtctttgttagcagagaccacgtgcttgcctgcttccagcgcacgggtgataaaggtcttagctggctcgatacgacccatcaattcgaccacgatggcaatgtctttgtcttcaatgatctcatcgacattggtcacaaagttgtagtcatgacccgccgcttgcaatttttccttttccgcatcatctcgaaccaagaccttagcgatctcgatttcatcttgagctgcctgggtgattttttcatggttttcttttaataaaaatggtacgccactagcaacagtaccaaatcctagtaaggcaatcttaacagacatcctattgactccttgaattttctatagtagctccattataacaaaaacttgagcgtttgacagccaattgccttaaaaattctgaattttcatgacaggatctgcctgtagcaagttctggaaaagaacatagaatttgtggtacaatatagaaaataatgaaaacggtgacactatgagtaaacgaagagtacctaaaaaaatcaaagccctacttggaatcaatgccttcctactggtctgtatctttatttgtagctttcttctgatcaaacggatcactcagccgagggacgggaataccagtggcactgccgtgacgcgttctctcgaggaaggtagctcctctatcgagtggactcgggtgaaaaagccggtcaaactgcccatcctcatgtaccactccgtgcacaatatggccgagtccgaagctgccaatgccaatctgattgtcgatccagagacctttgaaagccaactaaagaccctgaaaaaagcgggttactacaccctgacgcctgaggaagcctatcgcatcctcgccaagaatgaagtcccaaaaggaaagaaatttgtctggctgacctttgatgatggcgtcgaggatttctataccatcgtctatccgcttcttaagaaatacaagatgactgccactaacaatatcatcacggactttacccaaaaggaaaaagaaaatgtcctgacctttgaccaaatcaaagagatgaaaagtgctggcttgacctttgaaagccatacggttaatcatccagacctagccaattccagtcttgagacccaaaagaatgagctggttgcttctaaacgcctgctggataaggtgctggatcaaaataccagcgttatcgtctacccatctggtcgctacagccaggtcacgatcgatcaagccaagaaagctgactacaaactaggcctcaccactaaaaatggactcgccagttccgctgatggcctctacgccctcaaacgagtccggatccttccaaccactacaggagaggatctcctaaccatgatccaagaataaagaaagagagtgggacagaaatcggtaattcgttagaattcgatttcgtcgtcccacctccgcacagttgagtagggctttaaaagctgatgaaatcagcgtagtagagcccactcaaccactgcgtcttgctcaacaatccaaaaataattgagaggctaggacttttgtcccagcctcttttgttagagttccttctctagttcttttagaaaagtgattaaaaattgatggcggctttctgctatttgtttggcagtctccgtgttcatttcatctttcaagaggagcaacttgtcatggaaatgttggacagtatcagtgagggacctccctttgtggccaccataggaaaaagttcgcgcaattcctacagctcctatcgcgtccaggcggtctgcatcctggacaattttgccttctaaggtttctggatgtttcccacgatttttgctgaaagaaacagcattgataacccgacaaatctggtcgatttggtcttgaggaataccgatctcttctagaaacatgcgagcattcgcattattttctgtttgaaacaacttagcatcatcagcatcgtgaagaagagctgacaagcccactatctccagatcacatggaccttctgcttgtgcgattctcatcgcattggtatagacgcggagggtatgctccacatcatggccatccgctcgatcagcaaataaggttttaacatactgcttagtatcttggattcgttcttcgatcatcgttcttatcctttgtacaatctgtgctcagttttatctattcatatgagctagttatggagaggggcagtttactttaaaaccacctctcggtggtgtttactttttcttttgtggaaagaggggtaggcctagggtcgcgatcttctcagcgggaatcttcatgccatccttgatccatttggagatgacagagacaatggctgagctccagaaggaattgaggtagctgccagcgccattcgaggagctgccattgcgtttttctaaaaagtcatagactgccttggtcaagagtcgctcaaaattataatcaatggccaagctaatgattttggcttctttcttgacttccttaaagaggtagacccagacttggtagaggtctgtcttgaaattgtagccatctaaagacttggtaatctttgcgatactagattgaaagatggactctagaatctcttccttggagtcataattacggtaaaatgctgctcgagagacacctgcacgttgaaccagctcagatatggtgatctttttcagatcttttttctccaacaattgcaggagagagatttcgatggattctcgtgtaatcgcattgttttctcggttaaatcgtttgagattttccaaggatttctcggatatttttctttctgccataacatttactttctatctgtctcacctgatgatatctgcttggatagcattgtacttcatgatataattgtaaaagaagacatactacttgtcaatgtacatttttatacaattatgaggtatgaactgatgaaatggaaaattattgcggattcaggctgtgactaccgctctttggacaatctggcaccggacacggagtttgtcagtgtcccattgaccatccaagtgggtgataccatctatacagatgatgctcagctcaatatcgatcagatgatggaggagatgtatgcgactacgactgcttctaagtctgcctgtccgagtcctgatgactacatgaagtcttttgaaggggctgaaaatattgtcgtagtcaccatcactggaaccctttctggtagctacaatagtgcagaggtagctaagaaaatttatctagaagagcatccgaataccaatatccacgtcattaatagcttatcagctgggggcgaggtggacctaatcgttcgcaagctcaatcagttggtcgctgaaggccttgattttgatcaagtggtcgatgtgatcacgacctaccagtctaagacgaagttgctctttgttttggccaaggttgataatctggtaaaaaatgggcgtctcagcaaattgatcgggactgttgtcgggctcctcaatatccgtatggttggggaagctagtaagacgggtactcttgagctgcttcaaaaagctcggggccaaaagaaagcgatcaaggcggcttttgatgaattgatcaaggcgggttatgcaggcggtcatatcaccatcgcccaccgcaacaatgaaaaatttatcgagcaattctctgcattggttcgagaaaaatttgcccatgcaatgattgaagtccttcctacttctggactttgtagtttctacgccgaagaaggcggcctcctcatggggtatgaaatttaagttaccactaaaaagaggctaggacaaaagtcctagcctctcaattgtttttggattgtcgagcaagacgcagtggttgagtgggctctactacgctgatttcatcagctttacagccctactcaactgtgcggaggtgggacgacgaaatcgaattctaacgaatgaccgatttctgtcccactctctctttttattctccgatctcttggtagagggtacggatttttttgcggtagatggtatagctgatccctgctccaatcagcagtatgacactataaaggatcacagctagcaaggtgctgacggaatgataggtccaaatgaagctgacaatgatcaagagaaacatcacaaagagaaagacaatcaagagaatagactgaagaactgcattcccacgatgacgggtcatcaactctgtgatattggtccaattggtgctaaagttctgaaaatctttgacatagtctcgaatgcagatcggaatagtggttacaacccagatcagcaacatggctaggatagccaagggatggacgccaaaatagagacaaacgccaactagaagaatgacaggaaggatggattgcaccagatagagcaaccaaaacttcataaagagatagcgtttgaaatcaatagggagcgatctcaagtactcaaagttttcgcgctctagcgaaataccgatactggtcaagcctccaaaactattgaaaacaccaatcaagatggcaacaagggtcagtggcaccagatactggggcgtcaagtaaggactgagtcctcctatatttttcgatgctcctgctgctccactgaggaggaaaatatatggcagaatactcatcatcaagaggacttgcaccataagggttccatcgctcaagagtctgcgatgatactgaatgacaaatcgtctaaaggagtctttctgacccacatggagcactctcacgcgctctttgacggtttggttggtcgcaactgcaagggccgcatcataaaactgcggaatcacgattttgcgaaccaggccaatcaagaccagaaggaccaggatccagcccagaaggccaaggattgcttctccatcaaaaggatggaggatgaactgatgaaaggccgtaaaaggtggaaatagaatgggaatatctgcgccccccgtcacttctacccgatgggtctgaactagattcagatagagataagctcctagactcagaagagaaccaattccgaccatgatgttggagaccagggtcgtgtgttttttgaaaaacaaggtcttggtgatcaaatgagctagtaatatcgtcgctaaaaagagaacgcctaagagaattaaggcacaaaagaggcctagcaggatccctaacggattaaagccacctgcctgcacagggaggatcagaaaatagctgatcaagggaaggatagccatgagaagagtcaggatgaccgagatgctctttcctgctatgacttctgcatctgagaaggcatagggcctgtaaaactggaggtccttgctttcataaaagacattgtaaaaactcataaagccttgggaaatggtcatcaaggaaaagagggcgaccatattgacaaagaaggctggttggttcacaaaatcatagatactaaagagcaagccaaatatgaggaaatagaccaggcctaaaaagacatagttgagcaccgatttacgggcaacattgagtttgacgtccggttttttggcctgtttggcacgtaattttgcgatctgagcgggctgactggcatagatgatattgacattgaccagttgctggataatcttaagacgcatgatcgccaccttcttccttccgacccgctagactgagatagatactttccagactttgttcgggatgttgtcccttcaattcctcaatcgtcccatagaaaatgagatttccttttttgagaatggcgattttatcacagagttgttcagctacttctaagacgtgggtagagaaaataaccgtcttgccccgatccgcatgctggcgcatcatttgttttaaatcgtaagaagcctgtgggtccaaaccggtcatcggttcgtccaagacccagatatctggatctgacaagagtgctgcaatgacgaagaccttctggcgcatcccatgtgaaaaggattcaatcacttcatagcggtggctctgaaaatcaaagatcctaagaagctcctctaaacgttggtcacagtctttctgactcatatcataagaggtcgcaaccaactcccagaattcattggctgtgagacgcaagaaaagatctggcgaatctgccacataaccgatcttctttttgatcgccagtcgatggctatagaggtcctgaccatccacttcaattgatccagtggttggggtgatgacactgaccaggctcttaatcgtcgttgactttccagctccgttgtgaccaatcaagccgacaatttgtccatcttcgatggtcagatccaagtggttgagggcaatgtgcccatcgtaatctttcgtaactccgtgaaatgtaatcatgttaactccctaattgatcctcgttgggaccgtttttcttattctgttgataagcgatcatcgaaatggtagagcaattctagcagatagtttggaatggtctccaagaagtcttctttgtagacccgctctcctcgcttatgcaattctttaccccatggtcctagattaactgctggaacctgaatttgagcaattttttccagatccagatcatagacctgggctggtgtggctaggctatctaggacgacttgataagaagccacatccttttccaaggcacaataactggtgtcgttaatccccataaagtattcttcgacttttaagaggtaacctcttgtgtccagatactcgcggtaatcagtgatgagggacacgatattgaaatcagtattgtctaaaaagcggcagttcatggaaggataatatgggggcgcaaaaccgatgaccaccataggatccttatctcctagaaactcaaggagtcgctggatttgctgaatcgcaaggctctggtagctggtcccattacgaaaatcttgctccgcttttttattagaagcttctctaaaggcttggtagccctctaaggcttggcaacgttcctctagttcttgataggtgatgactcttggccttgcaataatatggtcttggccagcctgatcctgcaagtgctcgtacttcttgtaaaaggcgtccaaggcctcttgactaagctcatagattcgttgcaagagctcttggggtgttttcttcaaatgcaacacactgaaataaccagccgcataaagcacggtcgatacatcgtactgctccttcaaatctctgagataggaccaagaaggaaggggggacgattctcccagcgcctgatctgccagatcgggatgaagatccagctgacttgcgatggctactaagagggacaaggcattgatccctttaaggggctccttcatatgggacaagacgccttgcgccacaacgactggcatgagtttgccgactgtgccaatgtgaaggaccttttcttttcctacttccgattcaaagggttctgaatccactgctaatacataattcagatcaaaggtttcctgcaaatctgtgaggaggcccaaagctccccgcatcccacgtgaataggattcctcgtctccaacagaaagataaagcaggttgacctgacctcctgagggatctgccgcataggcttccagaacccccaattgaagggctaaggctgctttcatatcgcaagaccctctgccaaatttccattctccagaagctaaatcttcctgcatatcaggtcgactgtccagtcctttcaaggcttctgctactttatcagaatcgagagcgatttccgacaaatttccatagtcttctagatcgactgtatcatgatggtggaaaaggataactgtttttttcttgcccttatcgaccaaggcccaattgaccgaccgatgcaagtgatcctgtggcacctggtagcgcccaaaatggtccggatgttccttgaaataagggatctgggcaatccgttgatccaggtaggcttcgatcccttgctcggtctcagtgttggtaaagctcgggattgccaaggcttcagtaaaaatcgtttcgatgctctctctattggtggttttcactttcaaaccaatccttctttgatatgatcaaactataaaatgaatagaaataaatgtaccagactgatatttctacgtaaataaaatgctactttttatattctcacttcatttctttcatgtatgcgatttcttttccagaaagggcttgcttccagcgcaaacgtttgtcgcatccaactatttttggtaaaatagggacattcacatgaaagaagaaataaaaatggaaaatcaaaccttaatgcaatattttgagtggtatttgcccgctgatgggaaccactggacgcgtcttgctgaagatgcgcaacacctagcagacttgggtattcgtaaagtctggatgccgcctgcttttaaagctacttctaacaatgacgttgggtacggagtctatgacctctttgatttgggcgagttcgatcaaaaaggaacggttcgcaccaaatatggtttcaaagatgattatcttcaagccattcaagccctcaaagatgcagggattcaaccaacggccgatgtcgtgctcaaccataaggctgctgctgatggcttagaggaattcgaggtcgttgaggtcgatcctatggatcgaaacaaggttctcactgaacccttcaccattcaaggatggaccaaattcacctttgatggccgaaatggcgcctataatgacttccactggcattggtaccactttaccggtacggactacgatgcttcacgtaataagaatgggatctaccaaatccaaggggacaacaaaggttgggctcatggagatctggttgacaaggaaaacggaaactacgattacctcatgtatgccgatatcgatttcaaacatcccgaagttgtagaaaatctcgaccaatgggctgaatggtttatcgaaacgacaggggttgagggattccgtctggatgcagtcaaacacattgactccttctttatgaagaatttcatccacaatattaccaaaaaatatggtgaagatttctacgtctttggtgaattttggaatggggacacagaaaccaacgatgagtacttggaaagcattgattacctgtatgacctggtcgacgtagccctccaccaaaatctcttcagagctagtcaagagggtgaaaatttcgaccttcgaactatttttgatggaacactagcgctcaatcatcctgaacaggccgtgacctttgtggacaaccatgatacccagcgagggcaagccttggaatctacgatccaagaatggtttaagcctgcagcctatgccttgatcttacttcgtgaagctggtttgccttgtgtcttctatggagactactacggtatcgagggccaatttgcgcaagaaagtttccaagtggtcatcgatcgcctcttatgggttcgtaaagatctggcctacggggaacaaacagactacttcgatgatcctaattgcatcggttggacacgctcaggtacagaagaatcagcaccaatcgcctgcttggtttcgaataaccaagctgctacaaaagtcatggagatcggctcatcctacgcaggtctcacctactatgatgtcctagaaaattgtagcgaaaccgtccaagtccaagaagacggtactgctgaattcccagtggcagagcgctccgtcagcgtctgggtagcccaagatacagagggccaataaccaataaatgtaattttctcctaggatctacatcttcctaggagaattttttcctgtaaaaattttataggaaatacagcttcattttagcactataagaaagcgctgtcaatgggtagcgcgtctatttgaaagaaataaagagcatcaaaaaaagctggaaaaaattatccagccttcgatgtttaatagaaataactgtatgacgcagtggttgattggtatcttcgttcgcttattaagctccgaagacaacctaatgagggaaacaaagtttcctttatccacaaccttcaacagtctcccagactgttgaagctatacgggggtgggaaaattgaaaaggtttggggaaccttttcaactttttttattttacggagttctttcccactcccttctttttagctcaattctgcaatgatttctttcaattgggctttcgtatgaactccagccacttgtttgacaacttgtccatcttttttaaatagaagagttgggatcgacatgataccgaattgacgtgctgtatttggattttcatcgacatccatcttacagattttcaaatcatcttcatgtacctcttctgccaactgatccaagattggagcttgcatgcggcatggaccgcaccaagttgcccaaaagtcaatcaagacaaggccttggctggtttcttcttcaaaagttgcatctgtgattacgtgtgccatatttcctcctttttcagtagtgactactgatttagcatttctacttttattttacactaaatgatgccattttagaaatatttgctacggggactccttaggcatcttctctctttttgcgccaaaagatgaggctagaagctgttagactgatcatacctaagagacccagagcatggtctttgctccctgtttgaggaagcgtatgatctgcttgttctcctcctactgcagaagtcgcaacttgaggatcttctgccaatccttgtgaaacaaattgagggccataggatacagctagtgtaagacgagattgctcttgtcttgctgattctctttgcatctgctcttctgtttcaggaagagtttggcttggttggacaaagtattctgggcttggaagcctatattcttccttgtagtggacttctggagcgactagagcagcaccttcaacttctggtaaattcgcatagtctgtatctgttgcacttggtacataggctgccttttgggcgcgggtcttttcgacaattggaatcgctgcctggatagaatctgtcttaaaggttacttcatagggatgctccaccgttaaatcagatgggtcataggtgttgaaaacaagcgctaacttgtgacctttcttaaccgtatagagatttggttggagataaacggtgtaatcgtggtattctcccactttaggctcgatgcttgcgcgagagcttgatgaatcgtagccagactcagggttcgcaagattgatccaccctttagcaatcaccttgtacttggtcttgatggtttcgtattcggcaacagataggttgcttaaattgcttcccatccagaaagcgtctgctgttttatcttgcttgacgctaccatttcctaccacgtcaaaatcctcatctgccacatctaccaagagagcgttgatttggaaattctttccttgacctttggcaagagctgccttgaaatgaacggggatgtggcccttgatcgtagtgtcctcagtaacatcagaaacaaaggtcagattggccttagaggaggctttgctgactgtttcattacggttagcgatttcaacacctgcagcagcataatcgctagaaatggtttcttctagccgtttagagcttgcattcaagaagagacgttgactgctcttccagttatcatagctggtccacttgcttggatcatagttgttttgagctagaaccgctggcaagctttcgacgtgattgtccactccgtaaaggtaatgggtcagccaggtattgagcaggtcataaaagtcctgaccattggcagtgatgccgtatccccgtgacatagccgctggatagacgtgatctccttggtggagatagagcttgacatcttgtcctgctttcttgagggcatcgtacatgagttcaaaatgtttggtcttgacattgtcatcattcaagccatggacgatcagggcgctggtcttgagattttctggatgaagggtataatcccgctccttccagacatcactgtagttacgatcatgggcgtactggtccttgttcaattggttgatgtagttggaatagttttgccaaattcctgcccagtcgtcttggtccagcatccgtgtgctaacgtaaagggagagccatgaaaggtcactataaggtgcattaccaaactgggttccttggctattgaaataatcataccaagaggctattcctgctgccggaacgatggtcttcaatccttctacgcctgtcgctgccacaccaaaggtcgtagttccagcccaggatagaccggtcattgcgacattacccgttgcccagtctgccttgatttcgacattgctagtcttatcagtgtaggctttgcgtttgccattgacccattcgatgatattcttgaaggcattgatttcgagatcagaccccgtcgtgttaaatccttctgatcccttggtaccaagtccggcgctagagataaaggcatagcctctgaccaagaaatagtcataccagttcagatcttcgtagtcataaatatactcgtagggactgtagtaataccaatccgatgccttggcctttttcgctgcttctactgttgtttcactgcttactggctgtctctttgcaggttggctgtgcagtttcttcatatcatagctaccgtctgttggaagccccaaactttcgagggtcacgtagttttcgtctagcgtccccgctacgtaagggcgcgcttccagaatagtggctgccttaaaatcaccttgcgctactgcttttggtagttgaacaatggctttaactaagtcaggcttgccatctgcgtcggtgtcgtagtccgtttcgacatagacagggaagcgtacaatttggctgtcttcatatttgtagtcttggtctgctttttctcccgtcgtataagggaaaatcggctgggcacgaccatttaaaaagagcggacttttcttttcagcccggtaggcatcgtagagtttcttagctgtttcatacatcttggccaattctggctgactaaccttacgagtcagatcttctgatttttcaatcaagcctaaactcttggcaaagcgttcgcgatctgcttggctttggcccaattggctaggatctgttgctgcccattgaagcaagccattaacagcatcttggaccgtcaactctttagaggcctgatccgctgcaagggtgctacctgtaacctttgccaaatcctgagctgttaccggagcttctgaaggaggagcagattgaggggctgcttccctgttggttgctgctggagttgccactgggaccgtaggctcactttgtcttgtgtgttcttctgtagcaggtgctgcttgatttgcaactgccgtccgatccagtgatgcctcatttgaacttgcggcttcttcacttgtgacagtgcttgtgtcacttgttatcggtcttgcttcagtagatggagcacggaccacttctgtcgatggagctagttcttccgtttgctcatctgctgctgctacttgatgcaagaccatcggtgcgatcaataagcttgatgcgacaatggaaaccactgttttctttttcatgttaatctcctcattttttgtaatcaacacccttattatactatgtaagcgttttaagatcaaacagatattcatctgatccacaaaaaaaccgaggcatcagcctcggttatcgatccttatttaacgtgtttcttaagatcttcttgtgcttttttatttgactctgcttgttctttttgccatttttcaagggctttgttgtaatcagcacttgtcacagctttgtcttggagtttcattcctttgtagatcacgtggtcttttcctttaccaccagtccatgcaaatggagctgagaatggttcgatacgtgtcaagaatggacgtccagttgatgaagaagttggcataacaagggcgctatcagtcaaccaagcttgcgcagccgcatatttttcatagcgtttgttgacgtcttgtgtttctgcaccagcatctttgatcatcttttcaaagtcgtacagaccaacttttttagctgcttcattgttttcacttgggtcaaatccaaggaaagtcttagtattttcaccagatgaagctttcaagatatccatgtaagttgatgggtcttggtagtcagggctccatccaacattatcagagagatcccagtcttcgccagccgcatttggtgcaaagagggtcacattttgaaggtcttctttcgaaagcatttggatatcgatgacgacattttctttaccaagcgcttcttcaactgattgtttgaaagattgcacccgttgaactcttgatggagtggtttggtccacaggcatatcgatgtgaattgggaatttcacaccatctgcttccaaggcagtcttcgcttttgcaaactcttccttcgctttcttcgcatcgaagagaccgttttgaccatcatctagtttagtagatttccactcatctccataggtatccaattgtgttttcaccatttcaccaaaggtcttaccattagcttggacaaatgttggtggaatgtagaggttacggatgatcttgcttgctccgtcttttccgttcaattgagcagcataaacttcacggttgaaggcaaagctgatcgcttgacggaagtccttgttcaagagggctttcttagtagattgtttttcttcatcggtctttttagctgtgtgtttgtaagattgacggtctatgttggtaccaatgacataagaagcagcatcttgaggagtgtaggtgatttcatctttaaattctttggcttgctctgagtaaccagatccagttgggaagagttttgccaagctaagagcattttcaccgaatgatttcgccagtttactttggtcttgtccatcgtagaattccaattttacatctgagacgtagaccttgtctttatcccagtagttttcattcttggtcatttcgatagaagattttgaagtaaagctcttcaagatgtaaggaccattgtaaagaagggagctggtgtcacttgcttgagcgaatttatccccttttgatttcacgaatttttcgttgacagggaaagtgatcccaagagtcaatttagagttccagtaagattctggttggttcaaagtgatttgaagggtatgatcatcaactgcttttactcctacagctgagaaatctttatttttaccactgacgtagtcattcaagcctttgatagaatcttggatgatgtagagcatttctgatttgttatcagccgcatatttgatccctgtgacgaaatctttagctgttacatccgcatactcttcgccttctgaatcataccatttagcatcatcacgaagtttataagtataagtcaagccatcttgcgaaactgtccaatcttttgcaagagatggaatcaagttcccgtatttatcattttcaaacaaaccatcaatcaagtttccagtgatatcgtgggttgctgctttaccagatgtgatatagtttaggttttctggctcagtctcatagacatatgagaatttttggccgttgcttgagctagatgatttagaacctccagaacaagctgctaggatacctgctgaaaggagggcaactcccgcaagtgcaatgacatttctttttttcatgtaaaactccttaagaaattttaagtttattttaagattataccacaaagattttcagaagaaaaggaattttcagaaaattttagtcttttaaaaaactactccggagagtagttctgaatagaatcaaatccttttaaaatcaagtgacatagcgatttataataattgaaataattgattttagacccaaacaaaagtataacgaaactttccgctgtgagataggtgcctgaaacacatttgtttcaggcactcgggagttttgaaactttaggttcaaaactaagtcatggaacttcgtagaagttcgctgacgtccgtactcacctaaggaaagtttctaaaacaactctctcttcagtctaaaccactacgtaatatagttgttatttttaatctactaattcgctcttgaggtaggcatcgaccatgcgctctgttgcgactacagaatccaagtgagtccgctcatatgagtggctagattcgatccctgctccgaggagggcatgtttgacttctgctcctgcgctcatggctgcagaggcatctgatccatagaaaggatagatatccaacttataagggatttcttgagcttttgccaaggctactatatgctgacggaattcgtagtggtatggtcctgaagcgtctttgacacagatggataccgtgtattcatccgtcgcttggtcgtctcccatagctcccatgtccactgccaagtattcgactacttcagccggaatacttgaattagccccatgccccacttcttcaaagactgaaaaggcaaaggtggtcgttactggcaattggatctgttcttccttgtacacgcgcagaagattcaagagaaccgccgcactcaccttgtcatctaagtggcgagatttaataaagccagtatctgtcacaatggtccggggatcaaagctgacaaaatcacctacttcaatgccaagggcacgggtttctttttcattggtcactttttcatccagacggacttccatattgtcctgggtccgctcgacagttccagcatccttgtagacatggcaagaagtctgatggaccaaaattgtccccgaatgggtctttcctgtattggctacatggactgtacaattttccccttcaatcatattccaagggaaaccaccgatacggtctagcttgaggcgaccatctgctttcacagcgcggacaatagcccccaaggtatccacatgggctgtgacatagcgttgcttgtctgtgatcacaccaggaacggtcacattcacgcctcccttagccgtccgagttacctcatacccaaagccctcaatggttttgaccaaatagtctgcgatctcacgtgtaaaaccggtcggtgaaggaatggctgtcaattcctgcaaataagtcactgtctgattcataatgcctccaaatgtgtttttctttattctagcatgaaataggtggaatagctagaggagagattacaggttagcgtttttcaactcttcccgtacttgcattaggagaaagccagagttctatttatattttcaacacattttgggagagattcatctagtgcacttaaaataaaaaaagaaacttgtccacaactaacggtgtctaaacaagttccacgcaggctatttcaatggtgatacataattatcaggataaaatatgatgtaatttttgacaatatctgttagactatcttcagttatgtttctccacttatggagatagaaggtttcagacttgagaacagagtgaaaccattcgatacagccattatctgctattttgtctcttttctgagaattcttacactcctgtttccagcgataaaggtggagcgtttgacgccgaaacattctaaaataatcgatacagggcacgttttcttatactcttctactagcttgataagacttactttgtcgattctcttatcaagttctgatacttttttagtaattctacctgcaaacgtaactgttccacttcagataactgtttcatcccattaccataagtatattgtttccccacgggttgttggaaacggtacaattcatcattctgataccatcgctaccaggtcttggcctgactagcatttttgatgctgagggtatccatgataactttatttgatttgcctgccttcttcatttcgatacaggctagtttagtttctactgaatatgctttttgaccataacaaaacacccctgtttctagtttaccagaattcaacaggagtgttttcttgtgtctcattttatgggtgcagtgccgaccctagggattctttcgttctcatatatacgtcattagtataggctaatttgatttaaattccaagagaaataacattttacataaaaatcagtgggtattttacaatttttgcatataatagagctaaaaaacaattggttttaagaattcttatctgaaacattcggaaattccccttaaccgtagcggaaagttgttttcttctcctatttataatagactatcactaacattagatgaaaaggtgactctatgactataaatcaactgcttcaaaagctggagcctactagccctatccttcaagctaactttggaattgaacgcgaaagtcttcgtgtcgatagacagggaaaattagcacatacgcctcacccttcatggctaggagctcgaagtttccacccttatattcaaacagatttttgtgagtttcagatggaactcatcacaccagttgctaaatctaccactgaggctcgtcgatttcttggagccattaccgatgtagctggacgttccatcagtaaagatgaacttctctggcccttgtccatgcctcctcgtatcaacgcccaagaaatccaagttgcccaactggaaaatgaatttgaacgccattatcgtaactacctggccgaaaaatacggaactaaactacaagctatctcaggtatccactataatatggaactagggaaagatttggttgaagccctattccaagaaagtgaccagattgatataattgctttcaaaaacgccctctatcttaagctggctcaaaactacttgcgctaccgttgggtgattacctatctttttggggctgcacctattgctgagcaaggattcttcgaccaagaagttccagaacctgtgcgttccttccgtaacagtgaccacggctatgtcaataaggaagaaatacaagtatcttttgcaagcctagaagactatgtctctgccatcgaaaactatatcgaacaaggtgatttgattgcggaaaaggaattttactcggctgttcgtttccgtggacaaaaggttaatcgctccttccttgacaagggaatcacctacctagaattccgtaacttcgacctcaacccctttgagcgtatcggtattagccaaactaccatggataccgtacacctactccttctagccttcctctggctggatgcccctgaaaatgttgatcaggctctggctcaaggtcacgcgctgaatgaaaaaattgccctctctcatcctttagaacctctaccttctgaagctgaaactcagaacattacgacagctctagaccaactggtgcaacattttgggcttggtgactatcatcaagggctggtcaaacaagttaaagatgcctttgcagattccagtcagacactagctgctcaacttcttcctcatatcaaagacaagtccctttctgactttgcccttgacaaggcgcttgcctatcatgattacgactggactgcccactatgcccttaagggttatgaggagatggaactttctacccagatgctgctctttgatgccattcaaaaagggcttcattttgaaatcctagatgagcaggatcaattccttaaactctggcataaagatcatgtcgagtacgtcaaaaatggtaacatgacctcaaaagacaactatgtagttcctcttgccatggctaataaaaccgtgaccaaaaaaatcctggctgatgctggcttccctgtccctgccggcgacgaatttaccagtctagaacaaggtctagcctactatcctcttatcaagggcaagcaaattgtggttaaaccaaaatcaaccaacttcggtctgggcatttccattttccaagagcctgccagccttgataactataagaaagctctcgagattgcctttgcagaagatacagctgttcttgttgaacaatttatcccaggaaccgaataccgtttcttcattctggacgggcgttgtgagtctgtcctccttcgtgtcgctgctaatgttgtcggtgatggcaaacacaccattcgtgaattagtcgctcagaaaaatgccaatccattgcgaggccgtgaccaccgctcacctctggaaatcattaagctaggagacatcgaacaattgatgttgactcagcaaggttatgcacctgatgatattctcccagaagggaaaaaggtcaatctccgccgtaactccaacatttctacgggtggtgactctattgatgtcactgagacaatagattcctcttaccaagaattggcagcagctatggcaactagcatgggggcctgggcttgcggggttgacctcatcattccagataaaactcagcctgctagcaaggaaaaacctcatttcacttgtatcgagctcaacttcaatcccgctatgtatattcacacctattgtgctgaaggtcctggacaagctatcactccaaaaattctagacaagctttttccagaagttgccacaagtcaaacctaaaacctaattcttaggaacaaacaaatcacctttatctcgatgatatgatacctcttaagtagacaaggtaaatatctaaaatctacggctctttgtcaactttagtgggttgaagaaaagctaagctcgagaaaggacaaatttcgtcctttcttttttgatattcagagcgatgaaaattcgcttcttgaagttttcaaagttccgaaaaccaaaggcattgcgtttgataagtttgatgagattattagtcgcttccaattttgcgttggaataggataactgaagggcattgatgattttccctttgtcctttagaaatgttttaaagacagtctgaaaaagagaatgaaccttctttatattgtcttcaatgagtccaaaaaatttctctggttccttattctgaaagtgaaaaagcaagagctgatagagattatagtggtatttcaagtcttctgaatagctcaaaagcttgtctaggatttctttattgcctaaattgtcaaattaagttagacttttcaagtaactcagaaaaacttggtagggtgattgaaatagttctaatggtaattcatagactacccgttgttcagctattactccttcatctgtaacaaaaaaatatttctcttgatattgccaaatatgttgtccatacccttttatttcctcaaacttactaacttcttcccagcctagtttactatatttcatgtatgttctccgatcttttcactaatatcttacattacaccttcttgcatatctcccagatatgttcttccaccaggtctccaaacaccataaaaaataaaatctttattttagcttggaattattaaattttgaactaaaatagcaacgaatgttatgaattattcatactctcttttgtaccatgaagtatataatggactgatcttttcaaataaatccatttcatatctatttctattcacttgggctttctcaactaattgaccaactttttcaaattcattatttttgatcaatttatcaattaaatctacatctttttcatcaatgttatgtgatgaaatatttttaatgattacctttaaaatttgataagctacctcgttatcatctaatttggaaatctcagatgttatttcccctcgttcagtaaagactagattatatcttccatttccatcctctattacagaaattccctccggatagtagggaggttgttttgaaaaataaattccaaattcatctaattttaaatttccaatttttgcaacttcggattcaattttgttttttaattttattagcattttattattcctattacaaactaagtaaaaatctacctttttctaattcatcaatcgagttctaattttaatggcttcacataattcgttaatatcagccaaggttactgttccaataaataattagcaataacctcttttaattcgataatagtctcattcgttacttttcttatttcaacatcattattccaatagtaaatgtcagttaatcccccatgcggtgggaaaagtgcttgatatattgtcaatttatctcttaaactcattcccttattagtatttgcatattcttttaaaatctgtaactgatttacctgttgagcaatagttttaatattatatttgtcaatgatagacaacaaatgatcgatcgattctaaaaaagtttctttcttactaatgtttatcattaaaaaacctcattaattactgctatttttgcatacaacagtaaagttaaatttctttaatcttacttttccttaatttctattctaccaaaatatgcccacgaattcatacgaaaacaaaaagagcagcaaactgagctgctctctattttgtttatttttctaccattccgcccttgataagactgtctttcgttactgaataactaactgttttgtcatctagcggattaaagcctgggacgatttcttttaatttattaaaatcgatttttgtgtaatcaatggtatttcgaatataaaagattccgtctttgtattctgatgtcagttcaaatccatggcccatcagatctttgaatttttcttggctcttagcaacggcttctttcatggtttcaagaggattctcaccaggaacttttgagacgtcgtaatcatcaactttttcttgtactaacaaggtatctcccttgtaatacaaggttacagtggtcttacctgcttcatcactcgtttcaagaaccgttttttgagcacctgctagtgcatcctcttttttgctttcattggtcgatgactcttttgtcttttctttagcggatgatttgcttgtcgctttactggtcgctttagtggacgattgatccgtagattttgatttctcttttggcgcacaaccaactaagagaaaacccactgacaataagatggctaatgtttttacagttttattcattttgaatccctcactattttatgatggttaaggaaatgactgacgtctgaaatgagtcatttagcaagatcgactgtcgttttagatgttattagaaaagcctcaaaaatgatgtttgcagtcccctccttatcgatcattgtagccatctgggtggctggaatgccatgcccaggctgtttggatgatggtttcgatattatcaaattttggttgccagccgagaattgcacgcgccttctcagaggatgcgatcagggtatctggatctcctggtctgcgatcagcaatctcaagtgggatcggatgtcctgtcaccttgcgggctgcttcgacaatctgaagattggagaatccggtcgatgagcccagattaaaggcagtcgattcattcccttttctgagatactccaccgcaagcagatgggcatctgccaagtcaaatggatggacatagtcccgaacattggtcccatctggtgtcttgtagtcatctccaaaaatagagattttttcacgtttgccttgagccacttgtaaaacgatcggcaagagatgggtctctggtccatggtcttctccgatcgatccatccggcttagcacccgctacattaaagtaacgaaggggtacatacttgatgcagtaggcttgatcggcccagcgcatgatggtttccatcatgagcttgctttcgccataaggattaatcggtttttgtggagtggtttcaagaatcggaatttcttctggaataccgtaagtggcagcggttgaagaaaagacgatgtagtgtaccccacattcatgcatgacttccaagagtttgaccatgccagctgtattgttgtcaaaatatttcaatggatctgccatagactcagcaaccagtgaataggccgcaaagtggatgaccgcatcaatatctgcatgttccttaaaaaccctgcgcatgaagtcttgatccgccaggtctccttggtaaaagacggcatctggatgcaccgctgcacggtggcctgtgaccaggctatcgactacgacgactttttcctgtccttcattgaccaagcggtctaccatgtgggaaccgatatagccagctcctccgagtacgagtattgccatttgttttcctttcgcttcttgtcttctctcttattgtaccaaatttctgcctcttctccacacttaaagtgtcgcgacaaagcgtctaaaggctgcttggccttctgctgttcgcttgtagacaccggcatcttcgagcacgcgcgcaaagatctgaccgactgattcacgaacaatagcttctgcttctacttcgtctgtgatggatgggtgagtggctttcaagtcagcagcccagtcttggtggtaactagccacactgctttctcgtccaagtagataatcttggacctgcttgagctcttctttgagacgaggaggcaaaatggctagacccatgacttcgatcaggcctatattttcttttttgatgtgttggacatccgcatgtggatggtagatgccatcgggatgctctggtgaggtttggttgtcacggagcaccaagtccagttcataatgcccattgcggattcgtgcaatgggggtaatggtatggtggggctgaccgtcggatgctgctaagacttgcacagctggatccgagtagcctcgccaggctgtaaggatatggtctgccagggcaatcaattgcgccttgtcatctgattgcaaacgaagaactgacataggccagttgacaattcctagtgacacagcttcaaagccctcaatggtgaaactttcctctacaggagctaactccatagggaaggtgtggcgtccgccttggtaatgatcatgagtcaggatggacccccctacaatgggcaggtctgcattggaccctgcaaaatagcctggaaaagtctcgacaatggtcaagagtcgctcaaaggtcttgcggctaatggccatgggaacatgctggctatcgaggaaaatgcagtgttcattgaagtaggcataaggggaatactggaagccccagtcatgaccgtccatatcaaagcgaataatccggtgattggcccgagctggatggtctaggcgaccttgatagccttcattttcaaagcacaattggcaggctggataatgactggctttggcaagtttggccgctgcaatgtctttaggatctttttcaggttttgacagattgatggtgatttcaagagaaccgtagggagtttctgtctcaaaggcaatattttgcgcaatggctttgaccttgatgtaatcattgcgcttcgagagggcatagaaatccgcaatcgcgtcttccttggactgacggtaggtctcccaaaaacgatggttgacttgactaggactaggggtaatccaatccatcaactccgcacccaggctgtcttttgcggccatactatcctggatcttgctatttgcaacagcgatctccactagctgatctttgagtgcaatcaagtctgccatatgagctggagcgtctagcccttcttctccaacgcaactcatgacgcgattttttagataaatccgatccatctcttcgtagtcactcgccgcaatgacggccgtgacaaatgcatctaatacctgttctgtcatcctatctcctttttaatcgagtacccgtgttcctgccgcaacttctgcaatatagaagcttggcgcatagccaacgacttcttcataacggttgccgacagcttctttaaatgcttcaaccttatctttgtttacgagagcgatggcgcaaccaccaaagcctgctccggtcatacgagcgcctaagacaccttcttgttcccaggctgtatgcaccaaggtatctaattctagacctgtcacttcgtagtcatgctccaaggatacgtgggaagcattcatgagacggccaaagccttccaaatcacctgcttcaagggccttgcgtgcttggagggtccgttggttttcaagtacagcatgacgagcccgtttgatgcgattttcatccttgatcaagtagctgtaggcatcaaaagcccagagatccaattcccctaaggtttggatatccaatttttcttggagttcagaaacggcagtttcgcattctgaacgacgttcattgtattttgaatctgctaattcccggcgtttgttggtattcatgatgaccacgacattgtctttgaggtccagcggtaccagatcatactctagggtgttggtatcgagataaatagcccgttgatcagctcccataccgatggcaaattggtccatgatcccagagttaactccgatgaagtgattttcggtttgtttcccgatcttgaccagatctagacgatctaactgaagatcatatagtttctcagcgatgacgccaatcaagagctcaagcgatgctgaagaagaaagaccggatccatttggaatattgccgtagacatagacgtccattccgctatcaataacatgacccgcttcttgcaagaaatggagcacgccttttggatagttggtccagttgtgctctttttcaaagtggagattatccagtgggacttcaatgatccccttgtcttcaaagtttcctgagaagaaacgcaagaccttatcctcacgctttcttgcagctccgtaggtaccaagagtgatggctgctgggaagacatgcccaccattatagtccgtgtgttcaccgatcagattaatccgtcctggtgaaaagaaagtgtggtcagccttttccccaaagacagcctggaattttgcttgtaaatcttgagatgtgattgttgtcgtcatgagaaactcctttagttttgtaaacgtttttatacttgtattatatctgatcgcaagtaaaacttcaagtatttttagtaaaattttattaattttttattttatgccaaagaaggctataacaaagggttttcctccgattaaaacttctattcgataattgccgacttgagttaattttagtaaaactttaccaaaaaatctcaattgggagtgacccaattgagattcttcatttcttagtgtttctttcttggatagacaaaagatccaaggaaggttaagaggctgacacccataagggccaggaggttctcggtttgaccggtcttaggcaataccgatgatgcaggacttgctgaaacacttgtaggagcctgagcagtgtcatgtgacacagagaccggacgaacttgtggaccatcaagagagcttgccttttcttgcttgctaacaaggacctgtgtctcagtatttccaacaactactggttttgtctgatgggttggatctagaactggtgaagttggatcttgggcttctggtgttggtaatggagcaggtgctggatagaagagaccatgaccaatacggtaagcgtactctgtttccgacatttttccatctacaatttttggaatattcaccggtaaggtacctaggtgttccttgccattgaagatgacttccactcctgcaggaatattaggaccgaaggcattgtctggtttgagggattctgtcggatccattcccttatttccatagactgctagaatagctttggctgctggatagttggctacatcataaggtttagagatggaaaggacagctgccttcttatggttggtgttggcatattggacgatttcagttgggatcttagttcgccagaaatctttatccagttgcccttcataaccgatatctgaaatcacgacgatgtgagtggctttttcgaggtcttcttttagactatcaagggtagattctttggtgaagtttttcgccacaaaggaggtatcttttggaagcaccccatctgccattaagcgacgcatgcccaaatttagtccagggacttcattttcaaacgctcctaggaggaggacatgatctcctttttgcaccttaaatggtaaggtatggtcttcattttttacaactgtcaccgctgctgctgcaatcttgcgttccaaatcacgattaaggttggagccgactgcttcttctgctttttcaggcgtccgagcacttggatcaaaattcaggaccccacgtttttctttgagggtgagaatccgacgaactgactcatttaaacgttcttctgaaatatcacccgtttgtaccgcacgcaccacttcatcgacaatggtatcaatcttgcttaaatcggttttactgcgaagggtcgttggcatcaagaccaggtcaactcctgctttgatggccattttcacagcttccacctcaccgaagttcttggcgatggcatccatccccatggcatcggagacaatcacgcccttatagccgtatttcttccttaccaagcccgttaaaatatcatcagaaagagtcgctggaacataaatcttctcgcctgtttcttttgaaacgacctgatctttttcaatctgcgggtattggatatgagccgtcatcaagaggtcgaccccttcatccatagcttttttgaatggaaggagttctaatttttcaagctcggcaagtgatttatccaccaatggcagacctgtatgggaatcgaccgctgtatctccatgacctgggaaatgcttggctgctacagccacattgtagtcctgaatgcctttcatcatcggaatacccaagtaagcaactcggtttgggtcagatgagaaggaacgaagcccaatcacagggttttgaggattattattggtatctagaaccggagcgaagtccacattcaagcctagtgcagaaagttcacgtccgatgatttgaccggcttctttggctagtttgggatcattggtagccccaatggccatattgccaggaagggcagtacccgtacccaagcggtagacgatccccccttcttggtcgatggctaataatagcggaatcttcccgttattggccttgttttcgatcgctgctttttgcatatcttgcgtcagagccagggtttgcttggtttctttgacgttttcagcaaaaagaataacgcctccaaaatcatatttatcgattgcatctgctacttcagcattgaccttggtgagatcctgtggcgactcctgattagcctcctgccacttacagaagtccggcatgatcatttgggtcactttttgtttgagtggcatgttttcaatcagtttttccacttcaggagaggccgtctctgtcgatgttaccgttggggaggcagcagggacagctgcacggtctgttgaagtcggcgtttcagacacttctccctgattttctgtggcggtttctggagttggagaagcaaccacctcttctactgttgctgccggttcattagcttgatccgacgcttgagctgtgtctgcttttgctgtttgaacggataatagagcaaaagccgttaatagggccgcagatggatagatgatttttttcataaagcgacctcctttctttcaatagatattgtaccattgttttatagttttgtaaacggttgcaacatctaaaacagaaaaaggataagcgtttttcacttatccccttttttctcgtatggtttttaaaacaccatttcttgaccgttttctgtcacttggtaagtgccctcagcaagattgattcgggctactgctgtgacagtttggtctatattttggcgcgtgatgacaatggtatgatcatctggtgtttccacttcaatgcttccttctaaatcaaaagcttgcgagttgttccggaaactaaagagcttgagaagggatttcacgactggacgctctacttcttgcgcaatttcttcattgctgtagtaatgacggttgatattgcggccttctttggtgttttctaagagttccaaatcattcttcccagccaagaatccaacgtaataaacctgtggaattcctggtgcaaaggcttgaattaaacgggctaggaagtacttacgatcgtcatctccaagcgctgaatagtatgtcgaattgatttggtagatgtccaagttgttgtattctgctgtggaatatttgcgtttaacatttgctcctaccttataaagctcatttgaagcatagtcaatctcttcatcattcaagatgtccttgacatcgaccaccccaattccatcatgggtatcgagtgtcgtgaactgcttcatgggactcatcttcaaccacttggcaagacgatccacttttgaactatagaggctatagagggttaccataggtagtgcgaagtcatagacataatagtcgtgatcagcaatcttaaattggatggaatagtgctcatgaatctctggaagaagctcagcaccgtatcctgcggccatatcgcgcaccttatccaacaaatcccaaatgtctggctccacgaagaaatcattggtgtccaatttcttgactgcataggcaaaagcatctaaacgaatgaggtcacaaccattgctcgccaaatgttcgatggtcttgcggataaagtccatggtcacttccttggtcacgtccaggtcaatctgctcttccccgaaggtattccagagatgctcagttgtcccatccgcaaaggtaatttcttgcttgggagctcgatctttgcgcttataaatcaagtccacatccgcttgagttggacgattctctggccagaacttgtcccagttgagaaagagatccttgtaagcactttggtcgtgcttctcttgataatctttgtagtatttagactgacgggaaatgtgattgatcataaaatcaaacatgagatagtacttgtcccccaggcgtttgacatcttcccaatctccaaaggctggatctacttgatcataatccacaggcgcaaagccacggtcaccggttgatgggaaaaatggcaagaggtgaaccccacctactgcatctccaaaatatttctccagattttcatagagatccttgaggttatttcccaagctatctgagtaagtaattaacatggtcttattttgaattggcataatggtttcctttccttttttgaaagccaagtctgaagagacctggcttttataagtttatgtattttaagaattgctttctaggatacgattgaaatcagcaagctgaatcgtccctttgtatacggaattgaacacgccctaagctctgtgtgaaaaagatgaatcttccaagaagccaaggcttcttattcagattccctattttcactgtgagcttttgacgggctttgtatcttgttatttcactgcgccgttgctcattcctgcgatgatatggcgttggaagaagagatagacaatggtgatactgataatgccgaccacgtaagatgcaaagcttggtccgtagtcgttgaaatattggcctgcgtagttgtattggaacaaaggcagggtccacattttggaatcccggttcaagacaaggagtggcaacatgaagtcattccagaaccaaagggcattgatgatcatggttgtcgcatgcatgggtttcatcattgggaagatgatgcggaaataggttgtaaatttattagccccatcgatttctgctgcttcatccagactttctgggatagagattttgatatagccgacatagaggaagagggtctgtggaatcgcataggtcaagtagagcaagatcaaaccaaaggtgttagctaaaccgagtttactcatcataaccgtaatcggaatcatgataacttggaaaggtacgaaaatcccaagaatcaagagggtgtacatgatggtaaaggcttttctcttactcatattacgtgcgatggagtaggctgccatggggataaagatcattactgcaagtaaagacaagacagtgatgacgacagagttccaataatagcctccgatcccatcagccaagagacgactgaagttgtcccatgtgaagttggttggaaatccaaagaaattgtctacgatatccttggttggtttgaaggaactaaagagggtggcaaggagtggcactaaaatcagaaccgatcctagaatcaatagaatgtatttgccaatcaaggcttttctttcatcttgtttcatcgtgcttctcctcttaaatttcaaatttcttagatactctcaattggatgatcgaaatcactacaatcaagaagaacaagattacggcaatggcattggcataaccgaattggttatttttaaaggcatagttataaaccaagagtccaagtgaggttgtggcattgtttggaccaccaccagtcatggcaaagacttggtcaaaggcggtaagcccaccttttagggctaggataaagaccatagagacacttggtagtaagtaaggcaattcaacattccagaagacttgcttgctagtcgcaccatcgattcttgctgcttctgtaatttcagatgggatagattgcagaccagctaagaagataatgatgggcatagctactccttgccaaagaaggacaaagacagctgcgaagatcgctccccacttagtccctaaaagactggtttgaagaaactcgatatgaagggcattcccaattgctggaagaccgtagttgaagacttgtttgaaaatcagagccactgtcaaaccagacaaaactgctgggaagaagaaccaagcacgaaagaaggtttggcctttgatcttagagttcaagacacgcgcaatgaagatcccaagggcaatctcaccaactaccatagcaatcgtgatgattgcagtaaagccaatagcattcatgaattttggatccataaagaggagcttaaagttgttcaagccgacaaacttgtagttataggtcaaacctgtccagttggtaaaactgtaaaaggctccttggaacattggcacatagaagaaaattgcttgtaataagaggggaatgaccacaaaagcccatgcccaatatttttgtaatacttttttcattgtctctctactcctaatccacatccgctttcatcgggttaaagaaggcattcaaatcattgaccattccttgtttatcacctgtcaagacatagttcatcgtcaaggtatggaagtctgcttcactggtccagtattgttgcaaccacaccaagtgacgatccgtaaaggcatatttggtcatcccagcaagcggtgaatcctctcctgcttgtttgaccccttcgatcgctgttggagatccgtccacatcatagtacttttgcatgacttctggacgggtcatgtattccacaaaggcattggcttcttttggatgtttggtagtagcagagatagaccatgctaagtctcccgcaccaacggttaagctttgtcctttttctttccctggaatcatgaaggtcccaatcttaaaattcggtttttgttcattgatcgcggtgatagcccaagatccatttggtgtcatgaggacatccccacgcgcgaaggctccgataacgtctgtataacctgcaccttcccagttcttttgcttcgaacctttaatgcgaaggatatccatgaccttgatgtcatctttcataatcggatcagacaatttaatggaatttggcttagaataacgaaggtattggttggcttcttttcctccacctgctgctgtcgcaaaggccaattgattgtaaccattgagggtccaagcttctgctcctgcaatcccaaatggagtttgtcctttggcaacgatgtcttttaccaactgttcaaattcgtcccaagtttcaggaaccttcaagcccaattcttcgaatttatctttgttgtagtagattccgtaagcattggctgtgaaaggaacgttgtagacttttccgttgacagcatatttttcagcgtagccgtttttcacgcgtttgagatagtctttattgcttaaatcttcgaagacacccgcttttgcccattcttgcagttcgatagactgtgggtaaatattgaccacatctggcacatctcctgcgaggacacgggtcttcaacacctcaccagcgtttggtacattgacaactttgaccttgacctttggattttccttttcaaaatcacgcgcgatttcttccaaggttttggtcatttcttttttctggttgaaatactcgatggtcactgtgccatccgcagattttccatcgttggagcaagcaccgagcccaaacaaggctaggcctgtagtcgcaagaagtccgatttttttataccatttcatttggctgtctccttttattttttgacaaaaacatattgtttgctgaggaaatctccctgaggaagaatgacggttaagccagcatacatgagctcggctcctgaatagacttgatccgtcccttctaagcgatagagcgcatcttcttccaaccctttgagtttcagggtcggctcgatctcctcaaccgttgataagacccgtacataggttacaaccgtgcggtcttgataagtgaactggacggctgcttgattgctaccttggcttggattgatcaagcggtagtgttttccgaactgaacaagtagtcgaatcgttttgtaatgagcgacttgagctgcaatcctatccaactcttcttgcggaagactggttagatccaattcatagcccagatttcccatcatagctacatgacctcgcgtttcaagtggtgtcatccgtcccatctggtgatttggaacagctgatacgtgagcccccatagaaatggtaggatagaggtagctagaaccgtactggatcggaagtctggcaatggcatccgtattgtcacttgcccagacctgagggaagtaacgcatcataccgaggtcattgcggccaccgcctccagagcaagactcaaagagaatgttctcatacttctctgttaagtaagaaaccacttcatagaggcccaagatatacgcatgggattgcatcttggtttctaggtaggttttcccatttccaagcttggtgatattgcggttcatatcccatttgatatagtcgatctcatggtttccaagcaagtcatccaagacctgcttgatataagctactacttctctatttgcgaaatcgaggaccagttgattccgtgaataggtgtgttcatagcctgggacttgaatagcccagtccggatgagcccgatagaggtcgctatcaacagaaatcatttcgggctccacccaaaggccaaattgaagttccttgtcatggatgccttggatcaattctgctagacttccacctaatttttcttcattgacggtccaatcaccaagggcccgattgtcatcataacgattgccaaaccagccatcatcaagaacaaagagttcaatccccaatttttgagcctcgtctgctagctccaataatttgtcttttttgaaatcaaagtaggtcgcttcccagttgttgataagaattggacgttctttatgggcaaattggctaggaatgatatggttttggacaaatgcttgactctctttactgagaccggtcaatcccttatgggagtatgtgatcatggccactggcgtatcaaagctctgatttggttccaattcccaagcgaagttttcaggattgatccccagtccaacccgaacttcattgagttgattcttttgaacaaatccttcaaaattcccactgtagagcagttggaaggcaagagcagagcccgcatcttctgtcacttcatgatcggcaaggatgagggccggagtctgggcatgtccagaagcaccacggttagagctgatggagaaaattccctgttccacttgctgacggcgaactgttttttctctcgcataggctccttgcagagtgatgatatcgtaatcacctgctgggatatctgccaacacactaagagccttgtggattacaaccttttcatcactcaagttttcaatctttgagaagctagtgatggttgcccgatcttcgtaggctatgtaatagagggtcaaccggagggccgcttgatcatcttcaaagaccaaggccaaggtttcagcactatctactgtatgtggattgggaagaccagttgcatcgacactgccagagtagatattggctccgacatagaggaaatccgtcacctctgtggcaccgtgctggatttgaatagacggctttcgaaaatctccaagcccatgctgtcctaagatttgacgttgggtatccaagctgaaggttcgattgtcaggtgttggatttccagagaaagcatgatccttctcatgtacggtattggaaaaatgataggacggaatcggacgtcccagatgcttgagcatcaggtagccatctcgattttcaaggatgaggctcagtcccttactttctacatagaacaaattctgttcaatacgaattgccatatcttcctccattgggcccgaaataatatcactatgtatttttaaattcggttccaataactttcttttttagcatgtctttattttactcgttgtaaacgcttccgaaaatagaattttgttgcacatatatggtaaaatgttaggtaggaggttcaaccatgtcagtcttttctgaataccaaaccgacactattgacctagcccttgatttttatggctacgaagattgtccgaagaattatgaatttggtcctagcgtccgagataattttgtactgcattttgttaccaagggaaagggagtcttccacttcaataaaaaagaaatccacctagaggccggggatctctttcttctccccaaaaataaagtgacctactacaaggccgatgccgaagaaccttggtcctactactggattggcatcagtggcaccaaggtgagtgatttcatgcgtttttcaaccctgcatgaaaaaggctttttaaagaaaacagaagtggaaacagaaaagatcggccagtttatggagcgactcgtccacaaggcagaggcttcgaaaatgacttctcactaccaactccatctcctctcgcagatctatgaactactatttctaatcagtgaagtggctcccgatatccatcggagtcatccatctcccacctatcagctctatctgacctgtaagcatgtgattgagacgcattacggtaaagaacacttgagtattcaagagatcgccgatgacctcaatgtccatcgctcctatctgacaactgtctttaaggagtttcaccagatctctcccaaggaattcttgcactcggtccgcatgcagcgtgcccaacagttactgaccaatacggacgagagcatcaagattgtggcctactcggttggcttttcagatcccctctatttttcaaaggcttttaaggcctatagccaactgactcctagccaatatcgtagcaaacataaaatttagtaaaattttatttctttttactattttttagagtatactggaagtagaaatcaataaaggatgaactatggcaacgattaaagacattgcggaaaaagcaggcgtttctcaggcaacggtctctcgcgtcctcaaccaggatgcgaccttatcggtcagtgaagacacgcgcagtcggattcttcgcatcgctgaggacctccattaccaaaagaagagccgcaaaacagcgcctcaaccagttgaggattttcataaaatcgtcatttttgaatggtacacgcgcgaagaagaattagatgacctctactactatgccattcggatggggttagaaaaacaagcccaggaattaggctatgagatctttcgtatctttaataatgacgattggtccttgattcaagaggcagacggcattatcgctcttgggaaattcagtcccaagaccattcgagatctagaaagctacggcaaacccctgatctttgtcgatagcaataccctctatttagggcattcctgtgtgacgaccgatctagaagattctgtcatcaccgctctcgagcatttccttgagcatggccacaaggagattgggctcttggtcggtcaggaagagacggcagatgcgacaccgcttcagatggatcctcgtcaacgagtctttcaacagtatctcacggagaaagggctctatcaggatcgctttgtcactgtcggccagttctcaactgagtcgggctatcagatgatggagcagctgattcaagcactgggcgacgacttgccaactgcctttttcatggccagtgatgccatagctgtcggagcccttcggtcccttcaggagcaccaaatcgcagtacctgatcgcgtcagtctcatttccttcaatgatacttccatcgccaagtatgtctttcctgccctctctacagtgaccgtctacacagaagaaatgggcaagcaagccattcagctgttgcgacaaacctttcagggggctcaaccaagtgttccctgcatggtcaaattagccaccaaactgacgattcgagacagcagtcgctaggaggtcttagtcttatgaaaacacacgaaatcctctttcaaaccctttctcaggcagatgattacgtcaacggggaacagttggcaaaagaactaggcgtttcccgcacctccatctggaaggctattcagcgcctggaaaaagatggggtcgtcatcgaatccctaaaaaagaagggttatagactggtctcaggcgatattctgcttcctgaagtcatcgccagcaatacccagttgaccgttactttgaatgaagaatgtcattctacccaattggacgcaaaattaggcatggaagcccataaagagggcagggctctctacctggccaagtcccaatctgctggaaagggccgctttggtcgcgactactactctcccgatcaagggggcatctacatgtcccttcacctcaagccccaactcccacctgcggagctccctccttataccctcatggtcgcaggagccatctataaggctattaaaaatctgaccctgatcgatgtcgatatcaaatgggtcaacgatatttactaccgccataaaaaaattgggggaatcctaaccgaagccatcacatccatcgagactggccttgtcacagatgtcattatcggagtcggtctcaatttagccatccctacttttccagaagcgctagaaagtaaggcaggttccttatttgaagggccttgtcccatcacccgcaatgacctgatcagcgagatctggaaagaatttctccaaacggatgtcgatgaactggtctacctctataaagagcgctccctggtcttaggccgaaccgttacttttgagcagaaccaacagacctatcagggcctcgccaaagatatctctgataccggccaactcttggtccaattagacaatcaagaagaaatctggctcaatagcggcgaaatctccttgacgaaatggtgaaaacgagtatagaaaaaaagccacccgaaggtggttttttttgatctattttgaaagctccttctacccaaagactacggaacttcattctttttaagatatccataactagttacggctttagctcttgctccattttttttacaaagtgatttaatgctgtttgcactttttctaggagctctgtttgctgagaatcactgacctcaactcggtttgtggtcccatctttctcaatatggaaataactaacatgtagtaatccccactctttatctaatgaaaaggctacatctattttttcaccctcaatgatcgttgaagaggtaatcaagattttattgtcatctggactaggaactcgtaccatccatttcaaatccccatccatttccagttggtctatgccacccacacgtctgatctctgcgtctgaaggaatcccatagccagcttttctaatggtattggcattacgatgatcaagtattcttgccagcaattcaattttatttttagatgaaaaatttagagctggttgttcattcggaacaaagagaagccaagctactaacacagtaattcctaataatagaaagatcaatcctttttttagcacagacatcctcctttcctcacttcttttctagctcctcttcgatgtatgtctagtatagaacaaaccaccgcgagggtggtctgttattatcgtaattaaaaacacctcaaaagctagaaataatccaacttttgaggcgttaatcaattaaggctcattattgataacagaaccaccactactgaatgtataagaaacaccgtctataattaaagttttattcattgcaaatgcaccaccgtcgttaggatcagcataatatcttgttccgtttaaatcaagccagcctgtttttaaatcacgattaactgggtcaaaataatatttttttccatctattaatgtcctctgacctacaaatgccttaccaaattcgtcaaagcaatacgttttcccatctatagtttgccaacctgacaatccttctccactttctgggttgtaataataccattctagaccagggtatccttgtttagatatccagcccgttttcatatcggaattaactggatcgaaataatatcttttatcacctatcttttggaaaccttttaacgcactattttcaaagtaataccatttcccatctatatttctccaaccggtagctttttctccgcttacagggtcgtaataattccattccgtaccagaatatcctggattagatatccaaccagttttcatatcacaattaactgggtcgaaataataaagttttccatttatattttcatgaccagaacgtgctccaaatggagtaaggtaataccatttcccatctatcaattgccagcctcttttttcctcaccggttacaggatcataataataccacccagagtaatctccaccattatacacattatattgccagccagttatcatatatcctctatcatcaaacttatagcttttaccgtcaatattagcttctgtgtttttataataagaaccattgttcagtgaataccaccaaccaacattatcttgatgccaatcagccttaacttgtgatactggggttaaaagtaatattagcaatgcaccacctagcaaacacttagttgcttttttcatttgcatttcctccttatattttgtatacgctttcattgtagcatgtttatttctctaaatcaaataatgtgtggatataaagaggtcactgtcaacgaattcaaatataaagtcactctctttttatttgtcctttaaaaggctatcagtgtccacttttagataaaatcatataagatattatctaaaagtagaccaaaaagtaattaaagaaataacctgctctattattaaaattttagcaactgactttatcaatgattataaatgaagcttattagctacctaataactcactctggttatataataaaattctttatcatcatagttaaaaacaccttgaaagttagaaaaaaatctaacttttaaggtgctgatcaattaaggtatattgtttataagagtacctccattatcgaatgtgtatgaaataccgtctataattaaagtcttacttcttgcaagtgcaccaccatcatttggatctgcataatatttatatttacctgactcaaaccatcctattttcaattcacaagtatctgaatcaaaataataatcttttccatctaaaccacttatatgaccactgtatgccccatacaggccaaagtaatactttttcccatctatctcttgccaacctgatagctgtttcccactttctgggtcgtaataatatctttttgtaccagaggcctcttgtatgcttacccaacccgtttgcatatcgcagttaaccggatcaaaataatatttttctccatctaaattctgcgaaccttttaaggcaccaaatataaagtaataccatttcccatctatatttctccaacctttaactttttctccgcttacagggtcgaaatacatattttctgtcccataatggaattgttcagatacccatcctgtttgcatatcaccattaactgggtcaaaataataatttttcccatctatcaattgctcaccaataagtgctccacttctagtaaggtaataccactttccatctatattttgccagccaattttttgatcaccatttactggatcaaaataagaccagtttatttttttcagactagtagcattacgctccgctatcggctgccagccggtcatcatataacctctgtcatcaaatctataccacttcccgtcaatataagctcctgtgtttttataataagaaccattgttcagtgaataccaccaaccaacattatcccgtttccaatcagcctttacttgagacattggagttaaaagcgatatcacaatcgcactagcaagcaatagcttattttttttcattttctttccctccttgcacgatctttgtatacgctttcattgtaccatgtttattactctaaatcaaataatgtgtgaatataaggaggctattatcaatgtattcaagggtaaacaaaaaaatttgcacaatttgcttataataaaagaggcacttactactctacttattttcttccaaaatattgccaatgtccatttaatgtcaaatacaatgtgacttatccatcaattgtttatttatcgattgcgaaatcccctaaaagcagtaatttgaaaaataacaaaattttaaaaatcttaaattgagtcttgaatattcatcatagcaaactctcaactttccggaaaacgtttctttttttagaaaaatataatttcattatttatcattcaataatttttgattccttcatactccccaaacaccatccccctattatccccccacttgtggtatgatggtagagtatgtttaggtgccgtcaaccctgctcgagcacctccgtgctaaaaggagaacgaatatgaaaatcgcatggaatgaaattaaataccaacccaagaagtttatcctgattgaactcctcattaccatccttatgtttatggtggtattcttgtccggtctgacaaatggactgggccgttcggtatcggcccaaatcgataactatgggaccctgcactacatcctttcgacggattcagaagggattatccccttttcaaccattacagcgaaagatttagatgaggtccaaaagataaaagggatagactattctggcttgtccatccagcgagcaaccgtctcaaaaacagaggattccaacactctggatatcacctacttcgcgaccgatcacaatgaaaaagagatcctcaatccaatcatggaagatacagacctcaagatctccgacttacagaaaaacgaggtcattttggacagttctttcaaagaagatgagggaatccaagtcggcgatcaagtgatcgacaaaacttctaagcaaaaactcaaggtcgtggcctttgcgaaaaatgctagatacggctatagcaagattggttttatcagctcggagacctacacaggtatgcagcaaaaaacagatccaagctatcaatggcaagcccaaacccttgtgaccaagaagagcatcacttctagtgatctagccagcaacttgatggtggcggataagaagcaagtaatcgataaaatccctggctacaaggctcaaaacctgacgctacggatgatcacgtgggtgctgctactcgcttcttctgctatccttggggtcttcttctatatcctgaccctgcaaaagttgaaacagtttggtgtcctaaaggccattggcatgtccatgagccagattacctatgtccaactatcccagctcaccatcatctccctcatcggagtactgctggggcttggtttggcaactatgatggcgccatttttacccaatagcgtcccttcctttatgaccctgaaagacaatctcatcatctcggttagctttatcctgacctctattttgtgtggtgccttgtcccttgtcaaaatcaaaaaagtagatccaatcgaagtcattggtggaaatggagaataagatggccattatcgcattagaaaatatcaggaaatcctacgccgatggcagccagatgcaccatgtcctcaaccagctgaatttaagcgtcgaacccaaccaatttgtcgccatcttaggcccttcaggatctggtaaatccactctcttagctatagctggtttactcttatcagcggacgaggggcggatttctatcgctggccaagacttgactgacctcaaccaaggccaatggacgcaaaaacggctggaattgctcggctttatcttccaagaccaccagctcctctcctatatgaaaatcggtgaccagttagaactggtggccaaattgaagggggaaaaggacaagaaaaaacgccaagaagaagtcaaagccttgttggcagatctgggcatcgaagcttgttaccaccaatacccgaatcagatgtctggtgggcaaaaacaacgggcagccatcgctcgggcctttatcggaaatccccaggtcattttggccgatgaaccaacggctagcctagacccagatcgagggcaagaaatcgctcaattgatccaaaaagaagtcaaatccaaaaacaagagcgccatcatggtgacccatgaccgctctatcctgacctatgtggataccatttatgaattaaaacacggccaattgctaaaggtagaaaaggttgattaaatacaaactagcgaacaagcatttcacttgttcgctagtttttttattcttgtggctccttgggcagctccatacggaagcgcaagcccatagccgttttgtcaaattggtaggccagttcctcatggtctagcaagtgttggaccacgaagagtcccaagccgccttccttcttctgacggctagcggtcattggcagctcggcggtctctaccatttcctggctggcattttcaatcgccaagtgcgtcccttcctcttcgagacggagctggatctctccacccgcatccgaatgcttaacggcattactgatgacatttgagagaaccaatttcagaatcgctgggtccatatagacggctttgtcagggatctgattgtcaatcgtgagcgcgcgggattgagccaagaccttgtactggtcgaggatctgctctacgacctgatccagctggatccactccttgttaccggccaattcttggacagaggacagggacaggatttctaggacgatctggttcatctcatcgacgatatcgagggagaccgacaggtagcggtcccgatccttgtagcggccaatcttatcccgcatattttctaggataatcttcaagctggctagcggcgtcttgagctcatgcgaggccccccgtaggaattcgaccttcatctgctccaacttcagattttcctgtttctgctgctctagattgtcgatcacttctaggagatggtgatagaggtcgttgatctgttgcttgaggacgccgatctcatcctgcgaatgaatgggaagactggccgtccgatccagtcgcttcatccgcttggtcatctgcttgatctcaaggatcggagcagaaatcaggcgggcatagagataggaggcaatcagtgacagaacaaaggaagcgaggagactatagggaagaaagcccagactgatgtcccgcgcttccttttgggaatcgacagttgctaagaattgcaaggtcaagtccttcccctctttagtctggatctttcgctcctcaatgaccagggaattgttctggctatccgggttcaggagcaagtcatccttgacctctagggcattttgtttttccttgcccttgatcgagaccttgatatcattggtcttagaataaaggtcaatgaccgactcaatggtcccttcttcctggccttgaaaacttttggccaaggcctgtgatttcttcaaaatcgtctggcgctgagactcgatataggtcgatgggaaaataaagtaaaccgaagcgtgtagaaggatgactaagccactaaaaagggcaaaggtgatcagaaagatctttgcaaagatactccgtttggtcatggtctctccaatttatagccgacattgcgcaccgtaacgatacagtccagctctagtttttttcgtagttccttgatatagacatcgatcacccggtcaaaaggaatctcctctgtctccttccagacggcatcgaggatctgagagcgggtccgggccttaccctcatgctggagcaagtattccaagatttccaactccttggcattcatggagatggcttgcccagctagactggctgtgtagctctcaaaatccacccgtgcctctccataggtgaagatccgtgaaggctggagctttttaaaaatagcttcgatacggaccttcaagagggacaaggaaaagggtttttccaggtagccatctgccaactctccaaaggctgtcaacttatagtcctcatcatggaaggccgtcagcatgaggacagggactgagctggtcttccggatggtcttgagcacttccaagccattgaggatagggagctggatatccagcaagaccagatctggcgcctctctgtgaaagaggtccagggcctcctgcccatcaccagcttcaaagacctcatagccacattccatgagatagtcgctcatcccttcgcgaatcaggacttcatcttctacgattagtatcttcatacactttccttttatctaagaaacttcttctacctcctattataccctatttctattttaggaaacaatctcttattcgacatccaccaagagatcttttggtttcttatgcaagagccattgagaagaaaggatggatacgagaatcaagaggaggccgccaaccaagacaatcaccaacaattggctcggttggatgtccatatggaggtctgttagggtcttactgaagctttctgcctcagctccaccaccaaggttggctgcagaggattcttgagccatttgtttggcaatgccactggttacgttcttgagtaccgtatctccgactgttttggcaagaagtcctgcaactccataggagaggaggaaggcggggatggaaatcatgaccaattctgccacgaattgccctgcaatctgcaccttggagagtcccagagctagcaagatacccacttctctgcgacgggcattgagccacaagacgaggagaagggtgagaagcaagctagcaaagatgaggctgccgataaacaaatagtccgccacttggaacatgctgctgatggatttttgcaaggccgggtagttggacgagctcttaaccaagtcaaagtaattccatgggatatccaaggctttgattttttcgatcaaggcatccaggtcctgatcccctttggcaaagaaggtcgcatcttcataggtagctgtttgaacagtattgccatagagcttggcagctgtatctaggtcagaaatgagggtatcttcatacaactcttgggcgtaagttagaggagcttggttcttccctgagaacagacccttaatggtcacttcgacagtttcattggcccctttttcattgtcagcgtcgtagagattggacttgagacgcaccttatcgcctaccttgagaccattctttttcgccaaatcttcgtgcatgaggatttggtttttatctttgtctgtcagatgctccccttggactagtttgtaggctccagagacaaatttatcttcttttgaagagtcattgacccctgtcaccatcaaggtattcttgaagtgcttggcccgctctggagattgattttgcagggtttcttcagtctcaatgatctcgtggtctaggatatctgcgatggcattgatccgcttgatggaggaggtgatcccctctacctggctgattttttcgatatcttctcctctgagattcccagctccccgaggggttcccggattggtcctgcgattgatctgcatggagaagctattggtgatggatcccaggctttccgatgaagctttttgggtcgcccccttcatagagagtccgatcaagctcaaggtccccatgaggagaatgatggcaaagagcaagagagacttgggccatttccgtgtgatataagcaaaagcattgcgcaacatagcattccctccttacttgctcttctcaacgaggctacggcgactcaattccaagaccacatcggaggcctccgccacttccttgctgtgggtgacgacgatgacacatttttgacgttccttggccagtttctttaaaatggcaatgatatcacctgctgtctgttcgtcaaggtttcctgtcggctcatctgccaagatgacaggtgcttctgaaacaagcgcacgcgctatggccacccgctgttgctgccctccggatagttgcaggacattgcgtttgatttgcgtttcgtccaatcccaattccaagagaatctctttcccagcttgtttgttgaccaggcgaacattttcaagtggcgtcaaatagtcaatcagattgtaattctgaaagaccagggagacatggtgcttgcggtggtagctagaccctttggtctggatgtcctccccatcaaagagaacctgtcccttcttgggattgtccagaccagccaagagggataggagggttgatttccctgctccagactgaccgataatgctgtaaaaagtcccatttttgaactgatagttcacgtctgagaagatctcttcttggtagctttggtaactataggatacatgtttgagttctagcatatatgtcatttctccttaactcatttttgttaatatttcttttggactcttgcgccagatcatgctggtcgttacaccgagcgacagaaggatcaagcacaagaggctagcataggcgattcctaaggaaaggccttgagggatttggttgagtaattctagggtctgctgttgaccggtctgtccgacaaactgctctaagaaacgatggctgaccatccgcccgatgagaaaggctgggatcaccgctagtaaggataccagcaccacttccaagaggaactgtctaaagatccggcccttgctcttcccaatggataagaggaccccgatttcgtggatccgctcccgtgtccaaagactgagtaagagcgatagggcaccggctcccgtcactaggaggacgatcatcatgatccgcaccaggccttctagggtctgagaggattccttcatctggtcaaaggccttgcgatcttcgaccacgcgtagagattgccaatccagatccaagcttttgacttgcttcaagagggcatcgattttctcaggatctttgacgccaaaggtgacctgggtcacttcttgctgactgagaccaagtagcttagtcgcatcctcataagggaggtagacttggttttcactcagatcagaggtcatccctgtgaatttttcctgtttcttacccgaaaagatccctatgattttaaaggtttgctctttggcgggagtctcccccatctgaaagctggataaggtcaaggaatctccgacctttagcttgttcttcttagccaactcttggtggatcaagatctggccgcgagccttgtcggataagtgcttgccttgcaccagttggaaactgctactccggaaatccaggtgctggtctgtcttctgggtaaagacagcgcctagcgcttgcttggcttcctgccccaaatcgtctcgctccaccgactgctgtcccgtcaccgcttctttaccaagaatgcgaacgggactttcatattgaggaaccatagctcccaccccagctagttgctgcaccttttcagcttccttcagagcaaagggagtagccccttgcttactggtcagggcaaaactggtcccagccgactgtttgatatggtcctccaacctttcacccacttgcatcagtgaaaaacagaaatacaagcaagagaggatcaagaggagaatcagaaagagaaccagattcctcgttcttttccgagaaatataggcgattgcctgttgtaagagcatgatcttaccctccatttcaaggtccacggcgatacaatgtggacgctttcatcatttgttatagttattatagaaaagaaatgtgaaatgtttatgaaatagaaaaaatttcctagaaaaatctaggaaaactgaacagtcgtttagagttactttatctatagccatagaaaaaacctttgaaaaaggattccttttcaaaggttttattttcttttcttcttcatttctttttcaatgacactagcaattttctccaccatataggccgtctgaagattgcgcaggatcaagagggcccaaaagaatgcaaagagcatctgacctgccatagtcgcttcattgaaaaaataagtctccatagcagtaaagactgctatcactgcaaattgttttgtattcatatcattattttaccatgattcggtaaaaaattcatgtattaatcgtcttgaagggtaattttatcggataggaagttaaattcctcagggatgatgctttcctcttcttccaccacttcggctttttgtccacgcgtcttagctgaaaactctgcccggatttgagtccattcctctagagaaaccgctaaaatctctggtgagaagcccgcagcattgctgaggatatttccaaacatggtattgaggttgtccctcttcatggtctgttcagcattaaaggcagactcaaaggctaaaatcgcgtgattttcattggcagcgaccggctgggatccgattaagagggccttatccgcacctgccaagctctcgataatttccccccaagcgttctgaagacggatcaagttggtccgtgccaactctggattttcaaccgcctcttgtaaaatggcgttgaccttgtttcgatctgcacggtagcccttgctcgacttggttggacgagctactgtcggttttgaagcaggaagactgctacctgattgcgctaactgttgcttgagttgagcgacttcctttttcaagtcttccagctgagctagcacattagaaggaacctccacagtagctgaattagaaacttggcccgtactttcagccaatttaatggtcatcatttcagtgtagattcgcggttgcaaactatttttgatatccgctagactggttgtcgcctggtcaatcagggcaaaaagacgggcttgatcggcttcaagattggccgcaaacaagtcactagcgtgagtgttttctccacctgtttggacaattaaaagatctctcaggtattgaagtaagtccgtgacgaaacgggccatattctttccgttgtcaaagataatcgccagttggtccaacgctgctgtcgcatcatgagctaggatggcagccacgtactgatcgagcgcagctagactgatggaaccagtaatctcttcagcgattgctgtcgtcaactcactacctgcagtcagactcagggcttggtccaaaatggacaaggcatcccgcatcccaccttcagcgcgccgggcgatgatctgaacagcatctgcttcataggcaatgccttctgtagctaggatgctttccaaatgctggacaatatctggcagtttaatagatttgaattcaaagcgttgcacccgtgacagaatggtcgcaggaatcttgtgtaactctgtcgtagcgagaataaagaccacattttccgttggctcttccagcgtcttcaacaaggcattaaaggcccctgttgagagcatgtggacctcatcgataatgtagaccttgtgcttggctagactcggagcataggtggacttgtcacgaatatcccgaatctcatccactccattgttggaggccgcatcgatctcgatgacatcttctaggctcccattggtaatggattcacagatatagcagtcgttacaaggctccccattgacttgattgggacagttcatggccttagcaaagatcttggccacactcgttttcccagttccacgaggacccgaaaagagataggcatggctgatcttgtcctgctcgacggcctgtctcaatgtccgtgccactacttgctggccgaccaattggccaaaggtctggctacggtatttccgatataaagcttgatacattagttcttaactccaaacatcttaaagtcccagtttgtcttatcgatcaagagagcgacaaacatttccaaatactcctgatccagctgatcatagtcagagacacactccgaatcaagatctaaaaccccaaggagctggccgtccttaaccataggcaccacaatctcactcatagcccggctatcacaggaaatatagttggcatgttggcggacatcatcgacaatcatagtttcttgcttctgggccgcttctccacagacaccctttccaagtgcgatgtggacacaagagacgccaccctgaaagggtcccaagatcaattctgactggtcatacaaataaaaacccgcaaagacagaacgaggcagggcgtgatttaagagagcactggcgttagacaaattggccaaggcattgctttcacctgttaagagagcgtctaactgtgccagtaaaagttggtattgtgattctttttccgaatgtttcatacctttcattataccaaatctttgcccaaaaattaagcttcaaacagcgaaagaaaagagagtgggacagaaatcggtcattcgttagaattcgatttcgtcgtcccacctccgcacagttgagtagggctgtaaaagctgatgaaaacagcgtagtagagcccactcaaccactacgtcttgctagacaatccaaaaataattgagaggctagaacttttgtcccagcctctggaatatagataaactaatttttagtaaaataacttaagcgattctgcaaagagataaaaccgaggtctcattaatttaaattgatcaagaatatactaaactttccgctgtgagaaaagtgcctgaagcttaactgcttcaggcacacggaattattgagagtaaaacagtttgggaaactgttttagcctgagccaagaaattaaagagcgaaggggctcaatatgaattgaacacgggctgcggattgtgtcaaaaagcgcaaaatactttagtactaaatctaagacacagcagctgattgaattcttctctcatcttttagctcggaagaatcctaatcagccttgtgggggcaggacaacgaagcaatcccatacagcagtgcttctgtcctgctccctattttgactttatccgcagacgccctttgtatcttgatttagtcatggaacttcttcgaagaagttcgctgacgtccgcactcacctaaggaaagttttttatgatacctttatctagtcatgtcgccgattgaagtgaaagacctcaaaatactgaatagcacgatagattaaaaagatggtcaagatgatggccaccagccaaatcgtctttagtccataaaactggatcaagtaggtcgaaaaaatggccccacagacgaaactcccgatcaagcaggtcataaagatggcttcccagaggaatttcatctccctgtctctaacaaaatttccataagctaccatggttttcttgagatttccggtcataaaagagtggttgtaggcatagctacctacttctccaaatgaggtcgctacgattcctaaactcaggccaaaaaaaggcacgatgaagacattttttaccgatgctggtaaaaatcccgtcaccaaggtcgtgaggataaagggcactagggtactcaagcgccagactgaattgtcaatcaagcgacgcaagaccgtcattaaaaagatccccagcataaaggccagcatcgtggctaacttcacttctacatctgagatctgatgaccaatcaagccgaccgatagaaagaccacatttcccgtctggcctgctgccaaggtcccacctcgacaaataaaggtataagcatctgaaaaaccagcacacatggtcaataaacaagcgaacgccttggtccgcgaatgaaactcccttttcatttccattctccttaggaaaaagagggagtggtaccaaatgtttaaataaacatttcccataccacccccacaaagttgattgagaactcttctgagtcttttagcgaatgaagagtctcaccaactactgagacattccgtaattccaactattgttataggattggagatcgattgccctcttgctccctatctttattttccttcacgcgcctcgttgaggattttttcaatcttggttgtgatcaaatcaatcgctaccgtgttagtcactccttcaggaatgatcacgtccgcatagcgcttggttggctcaatgaactgatggtacatgggtttcaccactccaaggtactgctcaatgacgctatcgagactccgtccacgctcctccatatcgcgcttgatccggcggatgatccgaacatcatcatccgtatcaacgaaaatcttgatgtccatcaagtctcgaaggcgcttgtcttcaaggactaagattccttccacgatgaaaacatcctgaggttcctgacgataggtcttactactgcgcgtatgctctgcatagtcataggttggaatatccaccggacgacctgccaagagttcattgatctgcgcaatcatcaagtccgtatcaaaggcaaaaggatggtcatagttggtcttgatccgctcctcaaaggtcaaatgactctggtccttgtaataagaatcatgctcaatcatagcaatcttttcattcggaaaattagccaaaatggcacgagacacactggtctttccaccaccagaaccaccagtaacaccaataataataggtctattttgcattttctactccattacctctagtcgtctgagaagaaatagacatctcagatacatcttatctattttaccatatttttgcctagacatgaatagtttttcagtcagaaatttggaaacaaaaaggaccttgcggtcctttgattatttagataaactagttctttagaaaaaaagccaagtgatcttgcatagaaataaaaatgagttctaattttttaaatgaatcaagaatatactgaaactttccgccgtgagaaaagtgctagaaacagtgatgtttctagcactcgggagttttgaaaccttaggttcaaaactaagtcatggaacttcttcgaagttcgctgacgtccgtcctcacctaaggaaagtttctaagatgactttgtcttcaatctaaaaggaccttgcggtcctttcattatttcactttttctaattttgcggcaaattcattaccaccacgtaggacgagtatattttttccaccgttgacaggtacgaaacaataatttgaattagcttgtatatagacttccttagcgctcttcacttgatagccttctgatttcaccgcttcttgaatgacttcaaatgtgtgttcaatttcttctttagaagtcgtgtctccatcatacttttctgaatcagctagagaatagaatgcgtaagccttgctatcgtaatacttatcactaataattccatgatctgaaatctgaacagttgtattatctccttctgtcacattcttccattttccaaccatggcctttggtgtttcaaccttgtgatagaccaaattatcttcaaagtttcctttgtatgacttataagttttcaagtcgaataaatcatttcttaaaataatattgcttccgtctttttggagcaagttatagcgtgtgttcccaccagacttaataacaacaatttctgttgtcttcaggttaaatttcttatcgacatccgcaagtgaatgcaagtctgtcgaatttaacaaagaaagtgcggtattaaattcttttttcgcttcattgcccttgaaaacctttttgatggtctcgctaccattgactttttgtttctttccacttagttcataagtgatcggactagaatccgtatttctcaaccaaacaccatctagacttggcccacctgaaaagaaaaagaaccaagcaaaggcaatcactgcgacaagtcccgcaactgcagccccaatttgggtttgtttattaaaagaaaatgtcaattttttcggtcttggaacaggttgtaaggttttcgccgatggctgcggttggacaacagctgttcgctcttgtgaaagaggtgcgctaggtgtaacaggtgcttcctgagcatgagcctgcgcttcagtggctggagctggtgcctcagttgttggagtcggcgcttcttttcgctctacgacaaactcccctttttcacgcgcttcttgaaattcttgcatacttggcttgcgaccattgaccgcttcaaagtattcaacccaatcgttttgattcatcatattccccttattgattcattataaaaactaaccatattataccacaaatccatggttaattttgtgattttcagaaaataaaagaaaaagtccaagcgattttccacttggactttcttcattatttcaaaactttttgtgttttcgcgtagttggcttctacagcttctttttcagccttccaccagtcttggtgatctgtgtaccacttgatggtgtcttccaaacctgcttcgaagtttgtaaattgtggttcccaacccaattcttcacgcaattttgttgaatcgatggcataacgcaaatcatgaccagcacggtctgttacacggtcgtaagcatcttttggttgacccattttttcaaggatcaattcaagcacttctttgttattcttttcaccatcagcaccgatcaagtaagtttcaccgatacggcctttagtgaggatagcccaaacaccagttgagtggtcgttggtatggatccagtcacggacgttcttcccttcaccataaagttttggcttgatgccagacaagatattggtgatttgacgtgggatgaatttttcgatgtgttggtatggcccgtagttgtttgaacagttcgaaatcgttgccttaacaccaaatgaacgtacccaagctttcacaatcaagtcagaagcagccttggttgatgaataaggtgatgatgggttgtatttggtttcagcagtgaatttttcaccaggaccttccccatgtccaggaagatcttcgcgcaatggaaggtctccatacacttcgtctgttgacacgtggtggaaacgaatgtcgtatttacgagccgcttccaagagtgtgtatgttccaacaaagtttgtgtagataaatggagatgggtctttgagggagttgtcattgtggctttcagccgcatagtgaacaatcgcatcagccttggcagccaatttgtcaactaattcagcatcagcgatgtctcccacaaccaactcaacacgatctccaaggatttcttcgatattggcacggtttccagcataagtaagtttatcaaggacagtcacatgcacgtctggatggttgttgtagacatagtgtacgaagtttgaaccgatgaaaccagctccaccggttacgatgatatgtttatattctgacattttttctccaaataatttttagttttgattatttcttaaatcaatctttttttagctttccttaggtgagtacggacgtcaacgaacttcttcgaagttccatgactaagttttgagcctagtgtctcaaaacttccgagcacctgaaacaaaatagttcaggtgcttttctcacggcggaaagctaagcatatagctcgcttcgctcgtttatagcaaagctaaaaactatataatgatgttcttgattgttttaagagcaatatttttacaaatcttctgcttttaggggtttgacatctttgagcaatgggtggttcttgtctgcttctgagacttctgcttcttccaagttttcccattgaatgtctaggcttgggtctgagtagttgacaaaagcatattttggtttgagttccaatgcccagtaatcattgactaagtatgtataggcaactttgtctgtcaaaacttggaacccattggctacaccacgagggacgaagatgccttttgaagcatcgatcacagtttggtaggtattcccaaagctatcgccttcacgaaggtctacccaagttccaagaaccttaccttcatctgctacagagatgtacttgtcccatggctctgcatgcaagccacgcaaaacattcttacgagagaatgaaatattgttttgcaacttgccttctgcaaagaagctttcagggaatccaaggggaagcattttctctttttggaagttttctttaaaccaaccacggttatctccgcgcactggaatatcaaactccatcaagcctgggatggcttcaattttgcgggctgctaattctttatcaaaaaattgttccgtcattaagcttctccaatcaaacggagcaaatattgtccgtattcgtttttcttcaatgattgcgctaattcatggacttgttctttggtgatatagcccatgcgataggcgatttcttcaaggttagccacttggacattttgcaagcgttgaacagtttcgatatattgagatgcctgcaagaggctttcgtgagttccagtatccaaccaggcaaaaccacggcccatgagctcaacagagagatctccacgctccaaataggccttgttgacatctgtgatttcaagctctccacgaggacttggtttgatgtttttggcaatttctaccacatcattgtcatagaagtaaagtcctgtcaccgcaaagttggatttcggatgttctggtttttcttcgatagagatagcgttcatatccgcgtcaaactctaccacaccaaagcgttctggatctttgacttggtaaccaaagacagtcgcacctttttctttggcttctgcccgttgcaacatcttggttaagccatttccgtggaagatattatccccaaggatgagggcaacatgatcgtcaccgataaagtcttctccgatgatgaaggcttgcgccaaaccatctggacttggttgctctgcataagagagagaaattcctagttcagaaccatctccaagaagctcttcaaaacgaggaaggtcttgaggagtcgagatgatcaggatgtctttgatcccagccaacataagggttgacagcggatagtagatcattggtttgtcataaatgggcatcaactgtttagaagccgctcgtgtcaatggatacaagcgagttcctgagccccctgctaaaataatacctttcataatggtaggcctttctacgtagtcattacccttattttatcatgtttatataaaaaagtcaccttgcatttgtgttacaaggtgatgacaggttgtgagaaaaagtctcgttaacgatcttcattatagtgattcaaataggacgctcggactaaatctcattgatatacttttattcactgatcactgcttctcttctgaaccatccgaatatcttacccttactcttgattttgtcgttcctctcctagaatccataaagctctgaaattcctcatcttcattatgatagacccctatcttaattttattcgcatctttatcataagctaatacatgtttcttgcaagtcccgtcaacaaatgtgagtttcacctcagctccccatgcttctgaaggaatggagctataggatggatttataatctcaatctcctcaataccctcgtaagaattcttcaaggtctttataaggctaacttcatactctttattgcgtcttgctcgacaatccaaagacaattgagaggctaggacttttgtcccagcctacttcttcacatattgttcaactggataatccgctgaatctaagcgcacctttcctcctaccactagttgggccaggtgccacccaatgatgggacctgttgtgaggccagacgaaccaagtccactagcgacatagaggcctgctcgatcaggaacagctccccaaaatggtgaaaaatcactggtgtaggcacgacttcccacgcgctccccgacgacttccgcttgagctagttctggatagtaaaacagagcttctatttccatctgatttagcagagcttgatccaccgtcaggtcaaagcccatctcattttcatgggtggctcccatactgatcttgccctgctgaaatggaatgatatccagctctccttccggcatgacaacaggatagtcatcagtatctagctctagctgataatccctcaactgtcctttttggggacggacatcgacttggtagccaagtggatcgaggatttgccccagccaggcccctgttgctaggatgacttggtcatagttttcaccagcaatctgatagccatcacttgagactgagagggtagcctcttcctggaccactcttgccccacttgcctgaagaagggtttccgtcagaagagctccttctacatgggctccacctgatgcatagaccagcttctcaaaaccttgcagacctgggaattgctgggctacttcttctttggttaaaatcgccaagtctccaatcaagggagattcttcccgacggctcagcgccaactgatagagttcctctaatttttcctcatttttcttgaggagatagacaccggtctgctggtaaaaatctgttttaattccgtccttggccagatcttctaccaattcttggtaaaaatctgctcccagacgagccaggcgataccaggctttatttctccgcttggaaaaccaagggctaataatgcctgccgccgccttagttgcttggcccactccatggtcatagacggtcacattcacctgtgcttctttagataaataataggctgcagtagatcccacgatccctgcaccaataatggcaactttcatcatgaccccttagatatgataaaaaggattggtgctggcttgactgccaatcacctcaatctcccacacttcttcagccttccactgattgagcttttctactaattttgacacaaaaagaacttcgatatggtgtcctggatccaaggccaggagaccatcgctcagcatgtcctgagccgtgtgatagtagatatctcctgtgatatagacctctgctcccctggcgagagcatccttgtaaaaggactggccacttcctccacagatggcgacgcactcaatgacccgatccaggtcagcctgatcataactgaccaagcgcaaagcatctaagccaaaggtttctttgaccttgctagccaactggccaaaggtttgagtagctacccgaccgatgcgaccaattccgagcccttctctcgtcaaactgaggggctctgtattttcaatgtccaagagctggcagaaccaatcgttgagaccatctgggacaatgtcaatattggtatggctgacgtagacagcgatatcatgcttgatcaggtcaatataaatctgattttgagcacgatcagctaccaaatccttgatgggacggaaaataggcgcgtgcttgacgatgatcaagtccactccatgagcgatggcttcagccaccgtctgctcccggatatccaaggctatcatgaccttatggatatctttttgtagcgtaccgacctgtaagccacggacatctccctccatggacaattcctgaggacagtatgcttcatagcgtttgatgacttcacttgctaacatgtagaacctccttgatttgtgcgatgcgctcttctaacgatgctctggcagattgattctcaactgggacttgctccaaggcaaaggccaatttctccacttccttggaccacttttggacaaaggctggagcttgttccagcatcaaatagggaccaaagcgtagttccttggctgacaactcttgagaaccctgttccaccacaaggatctcatagaacttctcattttcttccaagatcgcttcatcaacaatgcggaaatcatggtcgactaaccaatcccgcagttcatcttcacgattattgggctgtaggaccaagcgagagacattggctaatttttcaaggcctgccgaaaggatatccgcaatcaagcgtcctcccataccagcaatggtgatacaggaaatgcagtctgctggttcaaaggcagccaaaccattggccagacggacctcaatcttgtcttctaagccattatctgcgacattttggagggcagactgataaggcccttcaaccacttcaccagcaatggcagcctcaatcttgccttcttgtaagagggcgattggcagataagcatggtcactccccacgtccaacagacgcgctccagctgggacgaaactggccaccagattcaagcgatttgataattttgtaaattccatgtgcttctttctatacttttattccatcctatagtataccatgtttgcaccattaaaaaaaggcgcaacggcgccttgtctattatggaaaggtattactttagactttccttaggtgagtccggacgtcagcgaacttcttcaaagttccatgactaagttttgagtctaatgtctcaaaacttccgggcacatgaaacttatacgtttcatgtgctatactcacggcggaaactctcgctatcatcctcaacaagccgatattagactttagtcaatttccttatattctacttccaagccacgttgcacggctgggcgattggcaattttctctgtccaagcttgcaaatgcttgtattcctttacatttaggaaaattcctgctcggtcccagaccttgtcttgggcgagacggccataccaagaccagatggcgatatctgcaatggtatagtcatcccctgcgatataaggtttagtggccagttccttgtccagtaggtccaattgacgtttggcttccatggcaaagcggttgatggcatactcgattttctccggcgcatagtggaagaaatgaccaaagcctccccctagaaaaggtgctgcacccgtctgccagaagagccagttgagcacttctgtccgtttagcaggatctgtcgggattaatttgccaaatttatcggctagatacaggaggatattggccgattcaaagacccgaatcgcttcctctcctgactgatccaacatagctggaattttcgagtttggattgatggctacaaagtcacttccaaactgatctccctcgccaatcttgatgcgataagcatcataaccagcttccactccaagctctttcaattcctccagcataatggtggccttgatcccattgggtgttggaagggtatagagttggaaaggttggtcaccttttggaagggtttgttcaaagcgggcacctgctgttggttggttcaagccaccccaggctcctcccatttgactcggtgcttcccatacttctggtaattgataatctgacatctcttttctcctttgtctatattactactagcatatcaaatctcaggctccctttcaaaaatctgctacgctagctttacttgacttttctgttcaaaatgatagtatagaaaaaatacattttgaaggagaaaaaccatgtccatgatcgattttcatagtttggcaaagacggaactccactgtcacttagacggttccttgtctcttccgactattcgtcaattggcagccctggccaatattgacctacctgctagcgatgaagagctcaaacaccatgtcactgcccctgcccactgtgagaatctcttggactatttggaggcctttgattacattcgccctctccttcaaaccaaggaagccctgacccttgctgcttacgatgtggccaagcaagctgctcttgaaaatgtcgtctacatcgaggtccgctttgccccagaattgtccatggaccaagggctcaccgtcccagaaactatcgatgctgtctgtgaaggactgcgtcaagcccaggaggaatttggcattgttgcaaaagccttagtctgtggcatgcgccagtccgatcaagatctcacctctcgcattcttgcagaagccaaccaagttagtgatcaggattttgttggttttgactttgccggggatgagcacaactactctccagaagatattcgaactctaattgagcaagtcaagagttaccatcggcccatgacgcttcatgcaggtgagtgtcattgcccacactttgttgcccaatcgattgcatttggcatcaaacgcaatggccacgtgacagctctatctcatgaaccagccttactccaatcctttattgaaaatggggtcactggtgaactctgcttgaccagcaacctacagacaaaagcagcaccgactatagaagattttccttatttgaagatgaaggcggccggagctcggatcagtatcaataccgataaccggactgtatctgataccgatcttaccaaggaatatgccctctaccatcagcacttccaaaccaaggaaactgacttttaccagcacaatgtccatgccatccaggcttcctttgctagtgaagaggaaaaacaagaactccttaccaaactaaaaaaagcctacgcggactatctataaacgaaaaaaaactagcacttttataaagtgctagcttttttaatctttccacaaatccatggccttcaagaaatcgtctgaaacggtcacattgcgtgggttggcttgttcgcgttcttgtagtttcgcttctacttggaccaggctgttgatgccttcactgcgccagttgcgtaaaatggcttggatatatttccagtgaggcttgccgttaaagacagcttctcgtagggctgccttgatcacatctggatctgtctgatcctcacgcacggtcttggtcaggtcttcaatctcaaaaggcgtcaagagtcgtccaagctcctgttggaaggtttccaccaagtccttgatgacatttcccttagcaggcgcactctgtgccttcccttgtgtttgagcctctaaaatttcatccaagcgttccagggcaatggtcgcatcaaagatggcctcaatttctccattgagctcaatggtccggtattgaagaagtcccttggtggtcaaattggacataatccgattgacctctgtcaccgtttttcccagatgactagcaatctgattaggagtcaaggcctcttgaccggtcgtattttgaaggaagaaaaactgccaaaccaagtagtcatctgcttggtcaaacaattcatgataatgaaaaagcaaggcacttggaagaaccaagttgccatacttaaatgcttgtgaatatgtcataattcccctttataggtaaccataaaatgaaatatctttttccaattcttccaagcggtaaggtgtttcttgataaaccgcatagttgatccaattactaaagaaggttgtcgcagctagattccagcgaatgcgaggctctgtactggcatcatccccatcaaagtaattcttaggaacatccggatccaagcctgccttgacatctcggttgtattccttagccagcgtatcgcgatcatactccagatggccaaagctatacacctcacgcatgtctggactggcaatgatggaaaggccaacttcatttccttgcgcgatcacctgaagattgctcttttcaaggacttccttcaaaggaacatctgtatagcgagaatgaggggcaaggaagcgatcgtcaaagcctctcatgagcagactttccggacgcaccactgcttggtcatagataccggatagcttgtcacagagctctactttttgaatcccgtaacggtgatagagaccagcctgagctccccaacagaggtgcaaggtggaaaaaacatgacgcttggcccattcaaagacctgggtcaactcatcccagtagtccacttcttcaaagtccatcttttcgacaggtgctcctgtcacaatcaaaccgtcatagtaattatccttgatatcctcaaaggtcttgtagaagctctccaaatgttctgccgctgtattcttggactcatggctcgccatgtagaggaactccacattgatctgcaagggcgtgttagccaagaggcgtaagagctgggtttctgtcgcaaccttggtcggcatcagattaagaatgagaacattcatgggccgaatatcctggtgagtcgcccgaacatcatccatgacaaaaatattttctgaacgaaggatatcaactgctggtaattttttatctagagtaattggcataaaaagctcccatcttacaagttcttaactaacattatatgataggagcttatagttttcaattatggtttttctgtagccagttatagcattagactatattagtaatgcatcaaaactttgtagtcgtaatcgccgatcgcttcgcgacctttcaagtcgtccaactcgatcaagaaggcacaccctgcaacgaccccaccgagtttttcgatcatttcgatggttgctttcaccgtaccaccagtcgccaagaggtcatcaacgatgagaacacgttgacctggtttgatagcatctgcgtgcatgcagagggtatcgacaccgtattctttttcgtagtcagcagagataacttcacgtggcaacttaccaggcttacgaacaggtgcaaatccaactcccaattcaaaagcgactggacacccaacgatgaagccacgcgcttcaggaccgacgatcatatcgatcttcttatcggttgcgtattgaacgatctcacgaaccgcataactataagcattaccatctgccatcaaagggctgatatcacggaaggtaatcccttcttgtggatagttttcaatgcttgcaatgtaatcttttaaattcatggttaactttctttcataaaaaattttttacattccattatatcatgaattctactaacttgcatcattttataccaaatcattttccccagtctccgcatcaaagcaaaaatcccacatccgaaaaatgatgtgggattggaaacatgctcactattcttctatcaatttattgtactcgattttcatatcacctaggttcttcaaggaatagcgagagcttccgtttttaaaccaggtgccaagaatatactgctcagcgactttcttgctttgctttttcaaccaagtacggtctttgccataggtggcaagttgatcaagaagttgccggtctttatagattttgttatctgtttctagatatactttttcttgcactatagcttttttatgagagtcataaacaaatccaaatccaatcatggttttactatccaactcatgatcatacaaatataaccaatcagaagtacccttaaatactgttacagaaagatgttgcttatcatcgacaatatttttggaaaaagagaaagttttatgtccttcaccctcttgaaaagtatcatcacttccaatgatctgcgtataaggattaaacatcacatagcgcatccatccaccattttcagagtaagtgatctcctccatgggattttttaaactcaggtagattcctagccaataaaggcaaaaaagtaggatgggggtgagccagagaaatttttttaggtgttttttcataaggcctgtcctgttagatagtcataaatttcacgaaccgttccaagggccatcaactcctgctctttcaccgtttgtttgagattttggtagatgctgctttctgcgatttcgcgtttttctgcttctttattgaccttcatgatgccattttcaatggtcacaaagcctagctcttggaagatctgaatcattttgaccaagaggatctgctggatcttgagataggctgctaggtctttgagtttatagcggacatcgaactctgggtactggtagatggtcttatagagcttggcatactggtccctgctaccgtatcctgtcagatagtaggctttggagatctcatttttgaaatagacggcttgcaaatcatgctcttggaagatttgccgtagttgctctaaatcctcagggatatttccaactacaacagcgggtgcgcctgtcagatctggcagttcttgggtaaaatcaagaacgggaacacctgcggggagactggcatttttagagcggatattaaagagctgcacaccatccacacgcgcatcaaccagcatgagctgaagagtggtttggccattccattggttgacagataattgcacagctagctctaggtcttgagcctgtgcaaactctgcctctaaactccccatgccaaaagccaccacctcaaaggtcgcatcttcttgagaaattttgagtttcaaatgggtattgccggctcccatcgagcgtgccccttctaccttgaaattacggaccagaaagacgggctttttattgtccatgccaaaaggactcaagcgatcaaagcttttcaaggtctcaagtgttagttctgttagatgcaattcctcgtcaatggctagggtggacttgctgctgagatcaatttcttgttctgcaatgtaatccgtaagagcctgagacaaggcaggtagttggtccacctctaaggtcattcctgctgcaccggcatgtcctccaaaggcgacaaagagcgaccggtgaggatcgagagcctcaaagatattgaccgactcaggactccgagcgcttcctttagctcgtccatcctcgatacttaaaacaacgaccggctggtgaagttcttctaagagacgaccggcaacaatgccaagcactcccggattccagccttctttggccaaaacctgggcggacaagctcgtgtcgaccatggctttggcttcgtcatagatactttggacaatctctttgcgttcttcatttttctgatgaatcatgagggcaatttcgtgcgcttcttcatcatcaaaaccagtcagtagttcgatggctggatttgggtcatcgaggcgaccaagggcattgagacgaggggcgatctgaaagccaattgtttcttcattgacatcctccggacgaatcccagcgatctccaagagctcttgcaaccccatgcgctgggtatgttggagaacccccagaccgtatttgaccaggatccgattctcatctgtcaggctcaccatatctgcaatggttccaatcgcgactaaatctaagagatcaaccggcacttcttctaagagggcacaggccaacttaaaagccacgccacaacctgccagataatggaagggataatccgcatctggatgctcgggatgaatgatcgcataagcatccggcaaaacttccggcatagagtggtggtccgtcacgataacatcaactcccatcgcttgagccatggcaatggcttgattgcccgcgaccccattgtccaccgtgacaatcaaagaaatgccttgttgctcgataaagtacttgtagacactctcattgggtccatagccgtctgtgaagcggttgggtaggtagacttgcacctctgctcccatctgctccaaagtttccttcataatagaggccgaagtcatcccgtccgcgtcatagtctccataaatgaggatctgctcgtaatcttcgatggcccgtcgaatgcgctccactgccttgtccatatcatggagcaaataagggtcgtgaaggttctctaacttgggttctaaaaagtcttctaaatcttctttggtctgaatgccacgctcatacagtaaggttgctacggacgcttccaggcctgcttttttagcaaggactaaaaaggcctcatctgcatttggcgaagctaactgccaatcgtattttgaagtgatcatctagcttttggtctcctctttttcttatctgaatattatatcatgaaagcaggaaatgtcgggaaataaagggtcagacagatgttgaaacaaaatgaacagcaacctctatttctgtttcatttggcttgacttataggtataaaagcttataatatattatgataataatcttttttaaatatgtgatgggatgattattctgttaaaatttcgaacgtttattatcgttttaacattactaagcttgtcatttaccttatttttctatgtaaacaaacgtaattagaggctttgatgcggatctgatcgctgaggttgttacttttagctaacagatcatttatagatccatcatcaaataaggcgactagtttcaaggagtagaaattagaagcctttctgttttaggatatatcactatatagaaaaatgggagaaggcatgcaaaagaaaggaaatgaggccaattgaaatctctttataaaaagatagttgcatttgtagctatcatcggtgtggtagccttaggcttgtctgtgatcaaacctgttagcgcagccactgtttcaccaactgtcaccaatttaaaggctcagacaagtggacaaaaagttacattttcatttgactgggatttaacaggtaaatctgttaaagaaggcgacactttcacaatcgatgctccagaaggtgtcaatatcactgaaatcgcaacacaatcactacaagcaaacggtgctgaagtggcgactgtttcgatgacaggtaaaaagattacttttactttcaaaaaagcaatcgaatccatgaaccaaaacgtaaaaggtggattctcatacaaagcggaatgggataacactccaggaaaccctggcaacaaaacagctacttcaaaagtaggttctgagtcggtggtaatcactcgtcctgatggacctggcgtatttgaatctgtcttaaataagtataataagactggtgattttgtttctaaacaattcaaattagatgcatctgaaaactatgcatggatgaatgttggagatgactactatctaacaacttggttcatccgtatcaacggagatggtaagaaacaagccctcacaaaccctgttgtatcagataaaatccaagctccagccgtcgattactcaaaaatcacttttgctccagctgccaaccacgctgcaaacgaattctttgtgggaacttacttgaaaccatccttcactttaagaaaaggtggacaagtagttgcttcaggttgggatttctggaaacatgttaagttcgatgcagacggtaatggatttactgtgaatttatcagacgtaagtgatgttttcaaaacagcaacagacgaagaattaatcgttgaataccaaacaatcattcctaagacaaccatccgtattgacaacaatgctacgttaacagctgatgaaatcaaaacaccacaaacagatccagcgttctggaataacacagaattgaaattctgggtatctggtgatacaactgtgaccgttcaaaaagagtgggttggtgacgaagaagctgaccgtaaagatatcactgttcaattgtatgcggacggccaagctttagatggaatgactcaaactcttacccaagcttctggttggaaagctgatttcactaacttacctggtatcaaagacggtaagaagattgagtactccgtagtggaaacaaacacacctgatggttatacttcaaaagttgaacctatcaatgagtcgaatgttatcaaagtagtaaacacttcaaacaaaccaaaagttactgaaactactgcaaatcttgttgttaaaaaagctttcgaagtagccggtgatcaggaacatacacaacttccgattacagaaggtcaattcgaatttgtcttgaaagacgaaaacaacaaagtagtcgaaactgccaagaacaaagcagatggcactgttaactttaagtctctgactttcaataaagaaggtactcatacttataccatcactgaaaacaagggtacagatgctagtgtcaactatagtacacaaagcatcacggctactgtcgatgtgaagaaagataacgacaaactcgttgctactgtcacatactcaggtggagatggtgaacaaaaaaatacgatcaccaatactcaaaacaaaccaaaagtttcaaatgctaaggtaaccttaaacctgaaaaaagtatttgaaggtggcgaactgaagggcgatgactttgagtttgttgcaaaagattcaaacgataaagtagttggtacagctaagaacaaaaaagatggttcgattacttttgataccatcactgtagacaaatcagggacattcacctataccatcactgaaacaaaaggtacggacaaaaccattatctacagtgagcaaaccatcacggctacggttgtagtggttgaaaaagacaacgccttggttgtcgaacaaattagctactctgatggtcaaactgacacagatacgttcaccaacaaaaaagaagctcctaaaacagaaagtgtaacagctacacttcaagtgaaaaagctccttaaagaaggtgaaacaaccttaccgttgacagatgatcaatttgaatttgtcttgaaagaaggaaacactacccttgaaactgccaagaacaaggcagatggtactgtcacctttaaggaactttcttatactgcggaaggaacacacacatacaccattaccgaaaacaaaggtacggatgcttctatcaactatagcacacaaaccattacggctactgttgatgtgaagaaagcaaacgacaaactcgtcgctactgtgacttactcaggtggagatacagaacaaggagataccttcacaaatacgaagacacctccaactccagttcctccaacagtaaaaccaacgacagctcaattcaaggctaaaaaagtattggcgatcaatggtacgagcgatcgtacattgaaagcaaatgagtatactttccttctcaaggatcaagctggtacgctcattgataccaagacaaatgctgagaatggtgatattctcttcaatccagtaagctttaatgaagctggtactttcacctacacaattgctgaacaaaaaccagctacaccggaatctgctattacttatgacgaaactgttcatactgtaacagtaactgtcacaaaagatgcaactggacaattgaatgcggatgtgcaatacgacggtaaaaaggatgctcctacttttaccaatacgtatacacctccgacacctccaactccaagtgaaaaacaaattaccacaagtaagattttagaaggtcgtgaccttcaaggtggtgaatttagctttaacctcttggacgaaaatggaactgttcttcaaacaaaacaaaatgctgcagatggtacagtgacatttgatgcgatcgcctacacggaagcgatgattggtactcataaatataccattaaagaagtcgtaccagctgatcaggcaaatatccaatatgacgaaggtcaagtgtatgtcacagttactgtcacaaaagacgaagcatcaaatgctatccaagcagttgtttcatacggtgaaaagaaaacctttatcaacaaggtcatcccaccaactccaccaacaattgatattcctgaattgaaactttacacccttaaggttcgtaaagtagatgaaaagggtgatttccttgctggtgcagtatttggactctttgaagcagatggtgtgacacctgttgcaaacccatatggacaaggccaagcgcaagcaatttctggtcaagatggacttgcaagctttgttggatttgaagcgaaagattacgtgatcaaagagctctctgctccaagtggttaccaactttcaaatgaagttatcaaagtttctgtaagcgactatgttgctgctacaaaccttgttgttgataaaggaaacgtggtaaataaacttcttccacctccaccatcaacagataaaccgaaagcatcaacacctccaccatcaacagataaaccgaaagcatcaacacctccatcgtcaaataaagataagccgaagcctagtggcaagcctaaagaaagtaagcgatctcttccttcaacaggaacggaagatcatttaggacttcttgtaactggtttgacattcgtcgctacagctattgcttctatgacacttaagaagaaagaagacttctaagaaacatgaaagatctagtcaaacgtgactagatcttttttgtatctgcttctcttattctggtttgttttgatcttcataaaaaacaactttcccatctttaactttgaaggagtaactgatggaatcgacgtaactatctttggaatagtagaaattataggcaccatctggtaatttactcgcatctagctttttagctgccgcttttaggtcttgctccttaacggatacggcatcatctatataaatggtcatatcaactaactcttggtcaattagagtctgaaaaggaatctgatagtagccagcaaagtccttctttccttctttaagattttgggtggcaatggcatccaaccttgcctctttctcttctttaaaaaagtccccaaagaaactaatgaaatgaatagggagaccgatcttttgtttctttaattgtttctcaattttatcttcctgttctttaatagatttctgctccaaaaaagctttcttatattctggaagatggtcattatatgaatctgaccagtcacccgcaaaagttgttttctgttctaatgataccgtttgatcatcgtaggttttctcaaagtaggtatagcttacatgatactgtgggaattccaaagcagtccaatccagtttgtttatggtaacagttccatgcagaccaacttgagcaagctcactactaacaacttctttagcctttttgtaatcgctcgatgtcatgatcttacaactgcttagaaccatcgttaagaataaaatgggaactaggagtaaaagggaataacctttatttttcataggtctacctccaaaaatagaaaacttccaaaagttagctagagaactagcaagaactagatgaagaagggttctcacaagttgaaatgctcatcaacgtattcaattatctagctctattctaccattatttacaaggaatatcaggaaaaacaagaaaagagagtgggacagaaatcggtaattcgttagaattcgatttcgtcgtcccacctccgcacagttgagtagggctgtaaaagctgatgaaatcagcgtagtagagcccactcaaccactgcatcttgctcgacaatccaaaaacaattaagaggctaggacttttgtcccagcctctctccgtcaattattataaatcatccccgtacaggcttgctctgacaattcgacaaagcccagggattggtaaaaggctagatttttctcgctccgttcagtgacaagaagccgttgatagacatgggggaaagtttcaaaagcctcttctaagagtttctttccgatgccttggcgctgatgatctggtcgcaccaagaggtcctgcaccaacaggaccgagtgaccgtctcctaccaagcgaatgtaagcgacgagctctttctcatcatagactgctaactgccagagactagctttgacagcctcttctagcatggttgggttattggtataattggtccagccgaccgagctgtagagtgcgactaggtctgtcatcgctggaatttcttttttatactctaacatcttaactcctttttaaccgaaagtgctggaagaaggccatatcccggtaaggggactcttggcaaacagccagctccatcttgagcatagactctcgccagccttcttggcccttgaagcgattgtcctgcaaggcataaaagacacggatcccttggtaatccttgacttcaagggctaagtcttctactgctgcaccgagatcataggcctgtgccaaacccatggagtgggtttccagatcctgacctgctaagagatcaagcgccttttgagtatcattttcaaaaacgacggtctgcaggacgcggccaacttcattgtgcttaacgatagagagcaagcctcctggtttcaagaaacggatgaatttcttgagaaccaccttgcgatcctctacatactccaagacattatggcagaggatgacatcaaagctggcatcttcaaagctctctatctggtccagactcccaacgagttgctggtagggatggtcctggacccgcaaggccaccatttcctcattgggttccacagcaaggacttgattgtcttgcgccaggtggttggctacaaggccaaaaccactgccgaaatcaagcactcgcttccccttgatgtcctgtaattgttcaaaaaggatatcataatagatctgtccccagggttgccgaaggttttctaaataggcttgaatatttgcggccatcgatctcctcctatttgaaattgaacatcttgctagctatcttatccgagatgcgtgggaaaagggtatagagcttgtgggtcaggttcaaaagccaaggaagattgagctcacgttttggttttccaaagtttttaacaatcttcttagccacaaagtctggttccaaaatgtagcgatccacagctttgacatagcttccgtctgggtctgcctgatcaaagaaagtggtccggatggggcctggattaaccgtcgtcacatggacaccaaaaggcatgagttccaaccgcagagcattggagaagccgatggccgcaaacttggtagccgaataaaggctggatttggcagttgcgacgagacccgccatgctgacgatgttgacgatgtgcccctttcctgctgccttcatgtgcgcacccatcaagcgtgaaaactgcatgagggcaaaggtattgacctcaaacatttcctgcacctgctggtcagaaatgcgatcaaaggcctcaaaaatcccatagcctgcgttgttgaccaagacatcgatctgcccatagcgctgatagagctcttctaccaaatcttgaacggctgaagaatcagtgatatcgatcccgatgcattcagcttgaagatgactggcatagagcttttccagtttttcttgatttctgcctaggagaatcagccgatcttcagggaggagcttgaccatttcttgggccaagcctccacttgctcctgttatgagaatagttcgcatcttagatctccacttcttccaaatctttgacgacatagacattttcaaaaatgctggacgcatccttgcgcaattggctgatgtcttttgataagaagcgagcactgatgtggttcaaaagaaggcgcttggcccctgcttcacgcgccacttctgctgcctgcatattggtcgagtgaccgtgtttcttagcaatcttctcatcgcccttgccataggtagactcatggacgaggacatccgcattgactccaaggcggacgctggcatcagtctttctggtatctccgaggatcgtgataatcttaccaggccgaggggctgaaatataatccgctgcaatgatcttagtcccatcttccagggtgacatcttggccatttttaacctgaccaaagagcggcccaaagggaacacccgctgccttcagcttatctgcgtcgagcgtcccttcgaggtctttttgcatgatccggtaaccgacacagaaaatggtgtggtccaaagcctccgcataaaccgtaaatttatcggtttctaaaatcttgcccagagaatgttcatcgaattcatgaaaatgaatgcggtaaggcaggcgagagcctgatacgcgaagactagtcatcacaaaggatttgatccctactggtccatagatatctagatccgtctgctcttcattggcctgaaaggcccgactagagaggaaacctggcaaaccaaaaatatggtctccgtgtaaatgagtgataaagatcttgctaacctttcgcggacgaatggtcgtttctaaaatttgattctgtgtcgcttcgccacaatcaaagagccagacttcattgatctcgtccagcaatttgagcgctaggctcgatacattacgggcttttgagggttgcccagctcccgttcctaaaaattgaatgtccattgtctactttctatctatataaatcatggccgtccggttctctgaacggaaagaaaggtcgccagggtaggcttgcgctaactcgaggagctcttcttggttatatcctgacagtttcaagcgtccatcttccaaggtcatcaagtcagtcagggctgagagggcttctgttttagtgaccacttctggttcagcctcttgcaagcagatcttaccatctttttcgaagaccaaacaatgcggaaagatctctgcaatttcgaataaaatcgaagaggtgatatcctctgctggatgttcagcaaagacacaggctagctcttcatttacgtaagccaatccataagacttacctgataagttgaggcggataaaaggcttccgttcatcaaaggtttgctggtctgtgaataagtcaaatacccggctcaagtccaagaaataatccatggcttccttggggctcttcttttgatagagctcggcgaaataggcgttgatcacacttgggggaggcgtaatcacacggagacgcaattcctcagggattgtgcttaaaagattggtcaggtagacccgatcgaggctggtatagcctccatattttattgctaaatcaacgtaatccgtcataaaattcttccaacttccacttatttttctctgcgatatagccttgaatgacctcgacatcctcttcaaattcgcgctggtcaatgatcgcaactgtttctagatcatgtgtccgataagattttgaaaaaggaacgcgaatggtaaagggaacaaagagttcactcagtttttctagaagcaaagcctggagatcctcacgggctgtctcagagcgcgctgaaatcaagctaaaaggtgtctgggttggggtaaagtctgctactttatctgctttgttgtaaagagtcaaacgagggatctccaacatatccaggtccttcatgatcgaaagcaccgtcttttcatgctcttcatgattgggatcagacgcatcgatgacatggaccagaaggtccacattcttactttcttccaaggttgacttaaagctcgaaaccaactctgttggtagatcttggataaagccaaccgtatcggtcagcgtcacttgcagattgcctgttaggtggatgctcttggttgtggcgtctaaggtcgcaaagagttcatcggcttcatactggctcttactggtcagctgattcataatggtcgactttcctgcattagtatagccgatcaaaccaatcttgaaaacaggtgattccaaacgtttttcacgaagggtttcccggttcttttcaactgccttgagctggcgctggatatcggtgatttgattgcgaacgctccggcggttcaactccaactgactttcccctggtccacgagaaccaattcccccagcctgacggctgagcatgattccttgaccgacaaggcgtggcaagaggtatttgagctgggccaagtgtacctgcaacttgccttcatgactcctagcccgcatggcaaagatatctaaaatcaactgcatccggtcaatgaccttaaccccaaggatttcttctaagttaacattttgacggggggtcaggcggttattgaccaccacggtcgtaatctcatctgcttcgaccatttgagcgatttcttctagttttcctgagccgacaaaggtcttggtatcgtatttctcccgcttttgtgtgtaggagccccggacatccccaccagctgttttagccaggctcgccaactcctccattgacatatcaaaattgttcatgccttgaagttccacaccgaccaaaaggatgcgttcttgttttttttctgtttcaatcatgctgtaaaaactcctttacatctgcaagaacctgctccttgaagtggggggcagaaatggcgtaaaattttacttccattcgatttcgaaaccaagtcagctggcgtttggcaaaacgacgcgtattgcgcttgaggatctcactggcttcctcaaggctctgctctcccttaaagtaaggaaagagttccttgtagccaatccctttagctgcctgaacctccggatggtcatcatagagccaccgagcttcatccagcaagccctcctctagcatgcgatcaaccctgcgattgatgcgatcatagatcaaggatcgatcatcatctagacaaatgagatagggttcataatcggtctcttcgtttgcgaggtcctgcccaaaatgagcaatttcaagagcccgcatggcccgacggcgattgagctgaggaatcacaagtccttgctccgccactctttggtacaagtcttcatccgacagcacgtctaattgagcgcgataggccagaatctcttcatgaggaacttcaccacctagatgataaccttcgagcagactttggatgtaaagacctgtccctccagcaataatgggaaggtggcctcgttcttgaatctcctcgatggcttggctggcttctgtcacaaaatcataggccgagtaagtctctgtcacctcgcgaacatcgatcagatgatggggagctcctgcttgctcttctgggctggccttggctgttccgatatctagggtgcggtaaacctgctggctatctccgctgatgacctccccgttaaagcgctgggccacctcgatagcgagggctgttttgccaacagcggtcggtcccactatcacaattatcttgtttttcatcgtttttccttgcaaaaatcgcattttttcgttaccatatattataacataaaaatttaaagttctaaaaaggagaaattctcatggctaaaggatttggtaaaggttttgttactggtgttgctggtacagttgctgctgtagcaggtgcagtttacacattcaagaaaaaagtaatcgagcctgaagaacaaaaagcagctttcatcgaagaaaaccgcaaaaaagcagcacgtcgccgtgtctcacactaatcattcaaaaagctccgggcaaccggggctttttttgtatctgttagttgcttttacattttaataagtcagtcgaaatatccaatgaattagtcaagtaatcccacaattctctatgtcatcatttacatatttttctttccgcagtgacaaaagtacctgaaacaggagctgtttcaggtactcggaattattgagaccctaggctcaataattagctatggaacttcgtagaagttcgctagcgtccgccgtcacctaaggaaagataaaatataaagaatgaattcaccgttctttgatcatcttcgttgcgatctccaagagttcgactcccatctgaaagtgctcgtctaacaaatcatagacggcatcttcggacaagacaccacaaggaagatcggctggaaactcagcctgattggacaagtccaaatcatcaaaataggcctgactactataataatcgcgcagttggatatagctttcttgatgctctcttagctgatccactgcttttttggtttcttccaaagttttggcatagtcattcaaataaccttccattctttggattcgttggattttgtcctgttcaattgccatgatttactccactttcaccacttctagatggggagcacctagaagcacgaggtatttttctacttgctctttgccataagaacgacgaagagcttctgcatagagatcgagctgatcccggtagcgttcgaccaattggctaggaaccttgtagtgatccgtcttataatcaaagagcaggatccggtcttctagcaccaagtaaccatccaagatcccccgcacgacgaaatcctcaccactggctggatcttccttcagcatagcaaagggagcttcacgccgaacacgtgaggcttctttttgaagcaaggtccccaaaggcgtctcatagaaagcgaggatggcctctagcttgatgcgggctttgaccgctggggctgcttggacttgctccaaggcttgatgcagcgtatccagcgtgatttcttcttcaagaggcacgcgctgcatgagttcatggacagcactaccgacttgggctcctgtcacggctttttcttgcccaaaagttggaagctcaaagtcaggcgtcacagtctttgcatccatgatctggacgccattggcatccatgactggctcgtagaatttcttgatttgacttggagtacggacacttggtaaatgaatagccggagcatagagctgattgagccgatcaacattttccaagatatccaaggcccgacgaatatcctctgactgacggatatccttgagctgatcgaagcgggaatccttctccttctctagtggctcaagctggtctggtgtcaggtcttcgtctgtcacaaaacgcgtgtcataggccagggtattcttggtaaacacatcttgaatggcaaagagccagtcctgataagaggtccattcttttcgcttctctggatctagcttgccattgcgactggttccccaatcggtatcacgcagtttgtcctcccggccttttccgaccagatagagcttgagctcggcccgtgtcatagcgacataaagaagacgcatctgctcagaaattgtggccaattttgtttcttccacattgcgttggtagcaaggcgtttcgatctgcaggcgaatggattctggagcagcaggattctctgtctcaaccggcaggttcgcaatgtatttaaagccaatccctttttgacgactgaggataatcggccccgattgatccttacggttaaaggccttgtccatattgagaataaagacatacttgaattccagccctttactcttatggacggtcatgagctggacggcatcttttggtgctgcaagagggacgctggccaaatcgtgttcattttcgattaccttgtcgatcatggcaatgaagcgcgacaaacccttaaagctggctttttcataatcattggcccgaagcgtcaaggcatagaggttggcctggcgctgggccccatttggaagggcgccgacatagtcatagtaatagcgatcctcataaattttccacagcaaatcatagagcgaagaggtcttagcagcagtccgccaagtagataaaacctggaggaagttctcgattttagctgagagcttggcatcgatcaaccgtgcctgctctgcagttttctcaagggctaactggaccttgtggtagaagggtagttgcttttgctctggaaaggtctgcaaagaaatccgtgccaattcatcttcatcaaagtcaaacataggtgatttcatgagagcaaccaaggcataatcgtgcaagggattgttaatggtccgcaaggtatccaacatgaccatcacttccagtgactcaagataatgcgcctgtccactatctgccacaatcgggatacgatactggtcaaaggcttccagaatcgcgtcatttcgagttcgagtcgcggtcaagagcgtgatctctttaaaaggcactttttccacccgatggaggcgtaaaatttctttgatgactaggagaatttctcccttggaaaccgtctcgagtccagaagcagcttcctcgtcttcggtcttttcttcctggtcttgggagccatcatagagcaaaaattctgcccgatgttgtggcaaggccatccgctgcttgtcacttcctgcaaccagataatgggtttgattgtagtcaatctcgcccacctcttcgtccatcaaatggcgaaagacatcattggtcgcgtccaacacctccacatgacttcggaaattttccttgagcagtatcaaacgcccttttgccccttcttcctggtagtccttaaatttatcattgaaaatctgtggatctgcctgacggaagcggtaaatcgattgcttgatatcccccaccatgaagcgattgtggccatttgacagcaagtccaacatccgctcttgggtgtggttggtatcctggtactcatcgaccatgacctcatgatagcgctcttgaaaggcttgtctcacctctgggaattgctctaaaatttgaatcgcaaaatgactgatatccccaaattcataagctttttcttggatttttcgctcaagataagcgcgagcaaagtctctgataaagtcccgaagcaaggagagcatggggccttcttcttggtggaaggtttgttgaaattccagctgatagagctgattttccaagtctctgaggcgattgatatgtatggttttatcctggttataagccgtaactagctctttcagctcttccttacgggctctgttggtcaaggctcccccatttgaagcccgactaatcgccacgacagcctttaggacagaggtcacttgctctttattggtgcgacctgtcaggcttccaatctgatcgagcacctcttctacagcttccaagtatttggctttgccaaatgcttggccttcattggacaaatgaaaggcaaaaaagctttctgcctcataaagggcctgctggatgctctccatcagatcgccttccacctggtcaaaatcggtctcctcatagccttttaggaaatgctcttccagccatttctccggatcactggtcgactgaagaaagttatagatctggtagatctgttctttaaacaaggttaaatttttgcgctgtcccgtgaaattcttgaccatctgcacaaaagcttcttggttttccccctggtaatagcggtcaaaaacagcttgaaaaacttcattttgtaagaggcgttgctcactggcgttttgtaaaatgcgaaactgaggcgccaacccaagcaaatagccatagcgcgttaggaccttttgggtaaaagagtccatggttccgatatcgctggtggcgacatctgcgatttgacgggccaggtgttgcttgagctctggatcatcactcgcttgaagggcttttccaagttcactttccaaacgctccttgagctcccctgctgccttgaccgtaaaggtcgagataaagagctccttaatcgaaatgcctcgctggatctgatccagtatccgctgcaccatgacaaaggtctttcctgatccagcagaggccgacaccaagatattggtccccgaactatagatggcatcgatctgttctggtgtccgcttttgctctttattagaggctgcctcttgggcctgaagggccttgatttcttctcttgtcaaaaatgcttgtttgatcatttgttcaagacctccttcatcttctcgatccaagcggttttcaccttttcaccgcgtattcctttttggtctagtttggtcaagaaccgtgcctgaccgaggtgacgatccgcttcaaatcccgtgatggatttaaactgctccacaaatggtgcgatattgcgaccattttcactatagggattgatggcaaattgccccttgaggatcccttctgctgctgttttatagagataagcgttgtacaagaggagcaagtctagttcttccttactcagcatcatagccttgttcttatcataggcctcgcccagataaggcgcctgatctgccataaagagccccttgtactgttgacttttcatggtttgattgatggcatcctctactgtcttggtctttttcagatccactacaggatctcccatttccaaatacatggctccgaaaatcccctgctcctcttggtattccttcaaatcctgaatggcagaaagataggtcggcaattgagaattcagtccattaaagaacttgtcatagtggaactgcgtcagactggacttgtagtccacgactccgagggctccccgatccctcaattgatcaatgcgatccaccttaccccgtagctgcaggagacggccatcggacaaatgataagaggtgtgggtgcttccaccaaagagggtctcctcaccgatagtctcgatcccattttgctgggcgaggacacgccccgttgttttcgcggtatcaagaagcaagttgcgaacaaactcggtctctccattttctccatacaattgctggaagtctgcttcttggctggtttctcgaatcgcctcgtttaaccgccgatcaaacgcttggtcggagctatcttttaagactttttcaaagatccggtgcagaaaattcccatgactgcgagcgtctggccggatggtttcgtcctcttgtaagcccaagacatagcgcagataaaaggcatactggtgcttgtagtattcattcaaggcagaagcggataaggtcaaggctttgccctctggatagagcgcttgaagcgtatccgactgaagctgacggctctttaattccgttgaaatttgaggaatctgaatgccttcagcggctaatttcttgcgcaagacccgtaccgccacaccccaaaagctagcttcttctgcagacagctcactagtgatctcttcttgatagagttcgatcacgcgtgctaagagggcccggtaggtcccgatatcatcactcgaggcttgagcttgtttggtcgtccactcgatggcaatgggctccttggccaattctacaaggtaaggagagacactatcttccatttcattaaccaagctaggggccgatagaaccagttggttggtggccgcattgaggagcgaaactgccacaaagcgatttttcttgagattttcgctggtcaccacctggagctctgctccttcttgggtggcctcattcagctgctggcgctcttcttcactgagcagagaggtgttctgagcaatctttggaaaacgctcctgggtcagcccgatcgcgtagacataaggcgctgtcaagggttcaatcaagtcataggactgaaccgtcaccacatcgaccgtagcaggaaccgtccggtattgagacaattgcatccccgataagaggagggccaaaaagtcatctacggtcagctcttggtcctcaaagaccaggttcaactcctctaagacatgtagaaaggccttccagacctggtcatagcgctcctgctcctccaaggctagatccttgatcaaagcttgtagattctgagaaagttgagcctcttgcagaaactctgtaaaggcggttaagagatgggtcaccttttgtttgcgctgtgaaaagaaaggggctagaggttctacgacgcgttcccggaaagtattgagttcttccagatttaacttaccctgatgattgctagtaaaaggcttgtgaaattttgtagcaccctttacttccgcaaagcgaaggtattgctcaaaagcatcgacttcttcttgcgtcagatcactatacagacccgttttcaacagattgatgacgtcttctgtctggtaattgaactgcttgatccgccctagcgattcaatgacctgaatcaagggatgttggatcatagcttcacttcgtcccaagtaaaatgggatctgatactggtcaaaaatggtcttgagttgcaattgataagcttctacatcgcctaacaagacccgaatatctcgatagcgtgccccatcatgaagacgctgacgaatggatttggcgacaaattccaactcttccttttgcgtgttggtttgccagagttggacagctgtacgatcgtgctccttgagctcattttccacttgtgaaaaatcatagcgcgcttctagcatgcgggtaatgcgactaaaagagtcttcgatcgcttgcccacgatactgaggctgtacctcaaaagtctttgccagctgaagaagaaagtcaacactggcctggtaaagattgccctctctaaagcttgctcgataggctttttcactggcatagaccccgatgacaatctccactccttttcggtgaaggagaccaatcaaggcctcttcttccgcagaaaaacgcgtgaagccatcaacgacgatcgccacatcctttaattgctcctctaagtgccctgcttcgacctgattgaggaaaaaggcaatcttggactgggattcataccggtgctggaccagcatctcagagaccgcttcaaaaatcgccaagaggtcctctcttttttcagcttcctcgagcatctctaaatcggtaaaatccatctgggctgtctgcaattcatgatagagctggactagttgctggataaactgaggatccttacgcagagccccgtaaactttaagatcctgctccttcatctgggaaagagctttaaaaaatagcatgcctagaccgatatcatccaagggttgctcctcaaagacctggttcaggatgaaataacgagccatttgggcaaagcgcgtgacggtaatggcaaaagaagcctgaccttctatataggacaagaccttggcctctttttcaaaggaaagagagttgggtgcaatgtaaaatacacgcttgccctgttctactaatcctacggcttcttgtgtcaggacctgggtcaagggggtccgaacatccgtatagagtaatttcatccgatccgttctccttttggtattttcttgagagcttgttatctccttattatatcattttcacagaagggactaaagcaagaagccatgctcctcttggcccaattttaggagatttgtgctacaataaaagttgaagagacagaaaggataccacctatgaccagcatttatgatttttctttagaaaaccagaatggggaggagattcccctttctcactaccaaggtaaggtcctcatcgtggtcaatacagcaacaggctgtggcttgaccccgcaataccaaggactgcaagatctctacctgcgctaccaggaaaaggggctggaaatcctagacattccctgtaaccaattcatggggcaggcaccaggaactgcagaagaaatcaatagcttctgtagcctcaactaccagaccaccttcccacgattcgctaaagccaaggtcaatggtaaagaagccctacctctctatgattggctcaaaagccaagcagctgggccactgggcaaacgcatcgaatggaacttcgcaaaatttgtcatcgaccgacaaggccaagtcgcccaacgcttctcctccaaaacagaaccagctgccatggaagacttgatccaagaattacttgagaaataagcaaaagcctgagcgtgaactcaagctttctgatgaatgactatttattttcgagactttccgctgtgagaaaagtgcctgaaacaataacgtttcaggcactcaggaattttgagagtaaaacagtttgggaaactgttttagcctgagcccagaaattaaagagcgaaggggctcaataattagtcatggaacttcttcgaagttcgctgacgtccgtactcacctaaggaaagtttctaagaagtcattatccataagccaaaaaagcttgagccaatgctcaagctttttttattattaatcaatttcaagtccaccggtgtacaagcggtaataggtgccacgttctgccatcaaggaagcatggttgcctcgctcgatgatgcgtccgtggtccatcaccatgatgacatcggaattgacaattgtcgatagacggtgggcgataacaaagactgtccgaccttccatcaagcggtccatcccttcttgcaccatcttctctgtccgcgagtcgatagaagacgtcgcttcgtccagaatcaagacaggcgcattggcaagggctgcacgggcaatggcgatcaattgtcgttgaccatttgataggccagccccatcatccgtcaagactgtctcatagccctgatccaagtgcttgacaaaggaatccacattagcaatccgagctgcttcaaggatttcttcccgtgttgcatcagcacggccgtaagcgatgttttctgcaatcgtaccagtgaataagtgggtatcttgaagaacgattccgagagaacgacgaagagaatctttctcgatcaatttaatatcgattccatcataagtgatcatccctgactggatgtcatagaagcggttgatcaagttggtgatagttgtctttcctgcaccagtcgctccgacaaaggccactttttgccccttatccgcgtacaagttgataccatgaaggatttgtttcttcccatcataagagaaatcaacatcatcaaagacaacatttccgaccatcttgacaagctggtaattcccatttggacgagggtgtttccaggcccatttgttagttttctgatcggtttcgaccatttctccatcgaccagttcataattgaccagcgtcacttttccttggtcgacttcttcttcttcatccaaaagatcaaagacacgatctccaccagccaaggccatgaggacaaagttcaattgttgagagacctgggcaatgggacctgtgaaggaacggttcaattgcagaaaggccataagaccaccaatggttaaaccaccgacgccgtttagcgcaaagagcccaccgatcaaggctgtcagaacaaaggaaacatttcccaagttcccaagaattggcatgaggacattggcatagcggttggcctggtaggaagattcaaagagttgatcattgatccggtcaaaatcctcaatgctttctctttcatgcacaaaggccttgaccaccttttgaccagacatcatttcttcaataaagccgttctcaatccccaagttcttttgttgggccccgaagtaacgacctgacttgctagagacattcttcatgacatagaacattacgacaagcatcataaggacaatcaagaacaagagcggactcactgtcagcatggtgatcgccactccaaggatggtaatcgctgaagataggagttgaggaatggattgttcaattgcttggcgaagagcatcaatgtcattggtatagatggacatgatgtccccgtgttggtgggtatcaaagtaacgaacgggcagtttttgcatgcgagcaaacaactgatttcgaagacttctaagtgagtcttgtgaaacagtcgccatgatcagggtaaagccataattggcaagtaccccgatcaaacagatcaaaccaactcgtgttaagaaggacaagagcggtccaaaatcatggctgttgcttgtcagcatgggctccacatagacatcgaccaaggactgaatcgaagctgttacattgaccgtagcaagagacgatagaatgattaagataaaggaaacaatcaaggacaccttgtagtttttccaaaggaagtcgagcaggcgaaggatagagcctagatttgcttttttcttagttttcatctgcttctcctttcccttgtgtttgcatttcatatacttcttggtagatggcattggtcgcaagcaattcctcatgacgaccgatcgcatcgatttggccatcattcatcacgatgatgcgatctgcatcttgaatagaggaaatccgttgaccaatgatgattttggtagtctctttcaaactggttgccaatccttgacggatcaaactatccgtcttggtatcgaccgctgaagtcgaatcgtccaagatcaagatcttcggattcataagaagggcacgcgcgatacagagacgttggcgttgaccaccggagacgttggatcccccacgctcaatcatagtgtcatagccatctttaaaatcttgaataaattcatcggcttgggcaatcttacaagctgcgatgatctcttcatccatcgcatccttatttccccagcgcatattttctttaatcgtaccagagaaaaggacattggtctgaagaaccatggccacttgcttacgaagagaatccagatcgtattctttgacatcgtggcctgctactgtcacccgaccagactcaacatcatagagacgaggaatcaactgcaccaagctcgatttccctgatcctgttcctcccaagatcccaatgacttcccctgaacgaatggaaaggttaatcccttgcaagacatgggtcttgtcgccattttcatcggtataggcaaaagtcacatcctcaaagttgatcgagccatctgcgacctctttgatcccattttctggagattcaatcgtcgttttggtcgtcaagacttcattgatccgctcgacagaggccatagaaatcgacaacatgacaaagatcatcataaacatcatgagcgacatgagaatggtcatggtgtagctaaacatagaggtcaaattcccagtggagagttgaccaccaacgatcagatgagccccgatccaagagatcaaaaggaaagaagcatacatggaaagcatcatagctgggctactcaagacaacgacacggatagccttcataaacatgttataaatcaaacgcgaagccttcttgaatttaaccgtttcatctgcttccttaacgtaagacttcactacccgcatattggtgatattttcttgaatgctgttgttgagattatcataagcttcaaatacttctgtgaagagcggatacacaatcttcatgatgatgcttaagacagctgccaaaaagatggtcacatagacaaagatcatggccatttccgcattgatcatgaaacaagccacgatggcaaagatcaaattgagcggtgcccgtacacagatccggatcaccatttgataggcattttgcacattggtcacgtccgtcatcatccgagtgactaacccacctgatgagaactgatcaatattctcaaatgagaaggtttgaacctttttgaaaatggcccgacgaaggtttttggcaaaaccagccgatgcataggcgccataacgggcagactgcatcccacaaaagagggagagaaaggcacagaccagcatgagcccaccgtaaaacaaaatattgttcatgtttctttgttgaacaccttggtccaaaagactcgccatgacaaagggaatcgaaatctcaaacacgacttcaaagaccatgaacaaggaagccaaaatcgagggcttcttgaattctttgatctcggaaattaaggatcgaatcattattacctccaatgttattcatactttttcctgcggtagaagcaaagcttctttccatcgaaaataggtcaaaacacacaaaattccctgagggaaagaccctagggattacgcgttttttatagttttcattgtaacctaaattgcaaaaaaatgcaagatttttagacagcatccgtttttctgttgatctagtacaaaagaggctgggacaaaagtcctagcctctcaattgtttttggattgtcgagcaagacgcagtggctgagtgggctatactacgctgattttatcagcttttacagccctactcaactgtgcggaggtgggacgacgaaatcgaattctaacgaattaccgatttctgtcccactctctctaagcgtatcctgtcttattcttccttagacgtagcgacgagattcaagaagcgatcaaagtaggacttgttttctttcaaatcctttttcagtctttgcgcctctgtcaattcatccgtaatcaagccatcaatgggttgttgcaaatacttggtcaacttttgcttgtcattgatggtccagacaaagagctcttttttcatctcatgagcttgtgtcactaaatcctcatgataagaaaagtcttcaatcgcaaagaagtcgactgaatccttttcaaagcgaccgaattgaatgggaataacatagccggtcttgatctcaggggctttcttctcgaccttttccatgaccgatagatccaaagacatggccggatagtctttttcaactcctaagtcccgcatcttctgcacgaagagatccacataattggcaggctctccaccatggggcttgagctcgaccaagagcttcatgttcaattctttggcccgtttgacatattcatcaaatgaagggatatgactcgtgtgtccatcctgttgaatcttgaggccttgcacctcagctagggtcatgtctttcacatccttgtccaccccagcaaggcgattgagattgtagtcatgcatgacgacaaattgatggtccttggtgagaagaatatccatctctacataagctgccttttccttggcagctgcttctaaggcttccagggaattttctacccctttagagacatcccctcgatgggcgatgagcttgacctggtcattaacctttagcgttgccagttcataggctgagatccccgattggaccatgagaaagactactgtcagggcaaagagccccttcatctttcgactgcctttggagcgcatgactgatcggctcggtacttcccatgcagaatccaagatgatgccgagcgaccccacctttgtcaagactgtgaaaataaataggaaggtccgaatcaagaccaaaaagatggtctctacccagaaatactgaccctctttatcgatcacggtcaaggtaaagaccaaacccaagatcaataaaatccctagaaaggttaagagaaactcaaaggacagaattctccataagagtcgaaagccccctcttttggtcatggaccaactttttttcaaggcacgaccaaatggcaactcctctaccacgaggttggggaccgtatagatgaggcgaagattgagatagataaaggtcagctgcaccactaagagtccgatggagccaatcgtggtcttttcaaactcccctgtgataaaggttggaatataaagcccatctgtcaaggtcgatccaatcaagacacctgcgacaggcaaggtcaaaaagagatagagcagaaaataaagcaggtttctcccagctaggtccttcaaacgaccaaatgattgccgcaagacctttttaaaggacaagtgtcggtcggttcgcgataggtaaatgaccgaaatcagggtccgcatctccaacataaacaagaaagcaaagaccatgataaagaccaaaagcgccagcaagctcaagggatggctcataacagagacaaggttgttcttatcgatattagcctgacccgcaagcaagactgccagatgaaagacccagctcaaggccgcagctcctataccaacgacaaattgtagcaaaattccaatcgcgataaaggaccatttgttgcgccagatcaaataaaaggccccctttaagtcttgccagtaagtccgtttcatctcaatccctttcctttcttttattcccctagaatagcggaaaagcctctccctgtcaatgattctacaagaaaaaggctgggtcaaaagtcctagcctctcaattatttttggattgtcgagcaagacgcagtggttgagtgggctctactacgctgatttcatcagcttttacagccctactcaactgtgcggaggtgggacgacgaaatcgaattctaacgaattaccgatttctgtcccactctcttctatttattctgctaagagcacttctttgatggtttgcttttgaagttttctgttggatagataaaagaggctttcatagaccaaagcaaaaccgatcaaagtccaaaagcacacattcccatcaaagtgatgctcaatcttttcaggaaccgtatctttgattacaccgatcaacattaccatgatggcatattgataaaccgtcccaagaacaaatcctagataggcccagaaacgatagggagcgagaatatgactttggcattcacgattggtgtagccaaaagccttcattaaggctaaggtttcacgactttctgagaccacaatccccaatgacaaaaagagaatagagaaagaaaggatcaagccaatcataatcatcatggtttggatgatgtcatctgtgtagtcccttaggccaaaggacaattgaaccatggccgcgaagcacatggagccaaagaccacaaaaaacaaaatcgattttctcccccaaatcagcgacgaagatagctcttttaggaaggatttctctttcgtggcagcactctttctccttttgaccttgattggtgtcggggattttttcaataagcgaagggccggcgtttgaagttgtcttctagcataaccaatcgcgagaagcataaagaaggtcgttggcaggatcaccaaagcaagcaagagctgccaatgaaagtgaatggtaatttctggcaggatccccttctcattgcggaagtcgtaaaaatgtcccatcatgagaaatgaagcaaaatagccaagaagcgctccagctccaaaactgaggccaaaggcccaaaatcgtttcgccaactggccattgctgtagcccaaagcttttaaaattcctaattgttccttgtggtcatcgacaaattgtttaatataaaaacacatgagaaggaccgacgtcaaggacaagacgaccccactgaccatggccaccatccaagatagcgaaacctgggcatcatagtaggtcgtcatcatcggattggttttagaaatctccaactgctcaatatccagataaaaattcaagaagagattggccacaaagacggcacaggccccaataatactgacgacaactaattttcgaatatcttttactgaaaacatggcttaccatccaatctcataggcagtctgaggctgatcattggtcaccacttcggtaatcttgccactattgacatgaatgatggttctggccatatccgcaatattttggttgtgcgtcaccatgatgagggtaaagcacaatttttcctttaatttccagatatagtccagaatcttgcgtcctgtttcttcatccagggctcccgtcggctcatccaagaagagaatctctggctttttagccaaggcccgagcaatagacactttctgttgttccccaccagacaattcactcggatacttgtccagcttatcgccaagccccaaatcctcgatgatctgcaaaaaatcatgattgtttgccaaatcagctcccatctttacattctgtctgaccgtcagattcggcaatagataatactgctggaaaataaaggcaatcttctcacgtctaaaggccgtcaattgagcatccgtgagttgcgataaatcttgtccttgaatgaggatatgtccctcgtccaccttttctaagcctgataacacgtttaagagagttgatttccccgatccagaagggccgaggataaccacatcatcctggtcttgaatctgcaaatcaatcccttttaaaaccttggtttggccgtagcttttgtgtacattttcaagttgaatcatttctttcctaccatttctttgatgagagattgacaaacctctgtcagtaatccaatcacttcttccatgctgaactgataaataccagaagcaaccatagaggccatcccgtgtgagtagataaatagatgctggtacaagcgactagcctcctctagagtcaaaggatagtctgcaacgatcgaatccagaaccaattggtaactatgatccttcatgggaagaaaatcttgaaagcgacgaatcggctctttgctaggattttggaaaagtaattgaaagagttggggctcttttgaggcgaaaaggatataagcaaccccgacagatcggaaaggcttttcatcttctaaggccttgcgaatatactccaccacgaccatttccgcagcaacaataacctctgcttgtaactcagccatattagcaaattgcccaaaaatgactctcggtgtggctcccagtttctccgctaatgctcgagcagttaaactagccattccctcttctctcaccaattgtaaagctgccccaatgatagcctctttactaaatttaaccttgggtggcataagactcctttcacgcaacattcgttgcgcaacacttgttgcataaagaataccataaaaaagaaagacttgtcaagaaaaatctgaaaactaccaaacaaaaaaccagcccactgataggagtggaatctggtttactaacaagattctaaggcaaatcattccctgcagccaagtagatttggtaccattccttgcgcgttagggtgactgttgtcactttccctgcttcaaggacatgttgaggcttggtcgttccgatgactgcctgcatcttaccaggatagcggaggacccaagcaagggcgatagctgtcggagtgacttggtattttttcgccaagtcattgagcacgtgattgagggtcgcaaactcttctttgccgacaaaattccccttgaaatagccatgctggaggacagaccaagcttgaatcaccgtatcagttaagcgacaatactcaaagacactgccatctcgcacggctgcttttggtccttccatattgacatgaaaaccagcttcaaagctcggtgtaaaggcggcactcaactgtaactggttgaccttgagaggctgtttgacagccgttttgagcaattccatcatcattggattttgattggacaccccaaaatgacggaccttgcccgcttgctccaagtgatcaaaagcttccgccacctcttcaggctccatgagggcatccggtcggtgaaggaggaggctatccaagcgttcaatctgcatacgctcgaggatgccatcaactgagtccaaaatatagtccttcgaaaaatcaaaataggtaaagccgtctttgcgaatcccacacttggactggatccacatctggtcccgaagatccggacggcgcttgagaacctcgcccagcaggacctcacactggccatcgccatagatatctgccagatcaaaagtgttgatcccaatcgataaggctgcctccaccaaggcctccacctcgtcttcactcatctgactgatccgcatcatcccaaggacaatcgtggacagacgctcattttcagcaaactcaatatagttcatgtccgcctccttttctgtagttctattgtagtgaaaaggcttgcaaaagtcaatgtgaaatcaaaaagccctcagctgtaactgagagcttactggttgaagtggaatttcttattcttcctcgtcatccaactccacttctccatgaattcggatatactcttcacgctttcgatccaattcttcccagagtggctcatcaacagctttcattacttctatctctttcaagctaatgtcaaccgcttcattgtaggtcaaatgcaacaaatctgcatgttttgttttaaattcttcaatactcagccatgtttccttgtcatcttcgctgatgtgaccgtcaattgcagttgccacttcaatcgccaggatatagagagctcgcttatcaacagttagaatatccttatgagtcgtgatgattcgtagatagtctcctttttctcgtccatcgctttcataggaatcttcaaaatttaaatttatattttcacgcttaaaagtcgcccaaggatcgttgcctactctaaaatcagccataccccaacgctcatcatttgaagaaaatttatccaaactaacactaaaatagaagtcatcatcacgtgcataagaaaactcaacctgcactcccttacgttccttgaaccacattttccaaggatattccatacaggcttgatagatgttagtttcgtagttacctttaagatacagtttcactcgtcgtcctcgtcatccaactccacttctccatggattcggatgtattcttcatttctgcggtcatcttctgcccaaaccgggtctctcacatcatccataaatggaatttcctccagactcagcttattagcctgttcataactcatcgaaagaatagcttcatgccggtttttaaattgctccacacttaaccagctctctttgtcatcttcgctgatttgaccctcaatggcagtcgcaatttctatcgccataatatagaaagcacgtttatcaacggttaggagttcaaggtgcttagtagcgattcttaaacattcacctttctcacgaaagtccgacatcatagcatcttcgtagtctagctctatatcttcatatttatgggataaaaaatcatattttatcccttccttaatctgaacattactccatctattatcatgcatccacttatttaattttaagtggatagaaagtttctcgattggtaaatctagataccctgcatacgacaagtcaggttctattccatctttttccccaaaccacattctctttgctagttttaagtaatcaaacgggatttcttttgtatagtcacctttaatataaattctcaatcttcttcctcatcgtcataaacacgttcgccatggattttgatgtattcctcacgttttcgatctaattcttcccagatgggatcatcaatagcatcaatcgtctgaatttcctccagactcatttcattcgcttcatcaaaagttagagataagatatcttggtgcttttccttgaattcctcgactgttagccatgttttcttatcatcttcactaattttcccatcaatcgcagtcgcaatttcgagtgccattatatacaaagctcgtttatcaactgttaatacatctagataattcgaagcgattcttagatattttcccttttctctaccgtcactttcataacttcctgcataatccaaatcaatattttcatatatttgggaattaattgcactgccacctttaaccttgacctctttccaacgagagccacttgctccccacttatctaaccgtaaagatagatagaagtcatcttgtagcatctcatcatctccgacatgtgagaaacttattttttgacctttccgttccttgaaccacattttccatgcaagttctctgtatccaaaaggcacttttctattataatcacctttgatataaattctcaatcttcttcctcgtcgtcataaacacgttcaccatggattttgatgtattcctcacgaagtcgttcttcttcatcccacaaaggatcttctacaggtttcaaacttttcagttcctccacactgatttcagttgcttgatcgtaggttagggataatatatccttgtgcaactccttaaaagtctctacatctatccaagtctgtttgccgtccgaactaatttttccatcaattgcaccagcaacctcgactgccataatatacatcgcacgtttatcaactgttaaaacatctgtatgagaagttgcgatacgtaaataatccccacgttctctccactctgtaatgaaagttttttcaaattcaagggatatattttcatatttataggaattccacggattgtttaaatcataagaggggatactatcccatcttgagtcacaaaaacgccatttatcaaagcttactacaaagtaaaaatcgtcttgcaacatctcatcatcaccaacgtttgagtatgtaataggatgaccctgccattccttaaaccacattttccagagcaactctcttgtcgtaaaggttatttttttcttaaaatcacttttgatatagagtctcattcgtcttcctcgtcgtcataaacacgttcgccatggattttgatgtattcttctcgaagccgctcctcctcttcccatagaggatctcttaccggtaccattgtctttaattcttccaaactgacttcaacagcttcatcataagtcagtgaaagaacatccttgtgatattccttaaattcttctacacttagccaactttgcttgccgtcttcgctaatttgaccatcaatggcagatgctacttcagttgccataatgtataaagcacgtttgtcaaccgtcaaaatatctacatgagttgaggcaattcgaagaaactcccccttttcgcggtcatcggaaataaaagcatgttcaaattcaagttcaatatcttcatattgcaaggacaaccaaggattgctcggaattataaaaggagccttatcccatctttcgtcaactgaagcccatttgcgcaactctgctccgaaataaaaatcatcttgcagcatctcatcatcaccaacgttggagtaacttattttcttgccatttcgttctttaaaccacatcttccaaacaagttctcttgtcgtaaaggttatttttttcttaaaatcacttttgatgtatagtctcataaatctgagatatcgcctccatgtgctagtatatattcttttcgacgattggcttcttcctcccaaagagggtcgtctaccacatccatcgtttgaatttcagtcaaacttagttcatttgcttcttcaaaagttagagatagaataacctcgcgctttttcctaaactcctcgactgttagccatgtcttcttattatcctcgctaatttgcccatcaatcacctttgcaatctcaagcgccataatgtacatggctcgtttatcaactgttaaaacttccagatgcttggttaaaatgcggagatagttccctttttcattgaagtctgtagcgaatgcatcttcaaactctaggtcaatacattcgtcaagatgtgaaaagagtcttcgtactccttcctttagggggatattagaccatctcttatcggcagtgcctttcctcagggataaatttaaggaaaaatcgtcttgcaatgcatcattgtccccagcatttgagtaagaaatttgctcatcttctggaaaccacattttaccagctagttccaaatagccataaggtactctttttgtataatcgcctttgatatagagtctcattcgtccttttctctattctctttattcccctccatcatatcataatttaataaaaaatacatgttagcctgtaggaatatcgttttaaatagcccactgataaatttcaatgcatgctaaaagcccccagctgtaactgagggcttatctaattagcgatagctaagagcacgtttgatggtcttccatggtccgaggtcatcggtctgaaggatcaggctcgcatagatacgggcaatgagaactgttcccacgatggtaaagagaaccgcaattcctaaagaaccccaagattcaagaccagtcgcatagccattgatggtacggaaaggcataaagaaggttgagaagaaaggaatgtaggaaccgatcttcaataagaagacgtcaccggcacttcccaaggtggttaccccaaggaagctaaagataactaacatcatcagtggcgaaatcgcttttcctgaatcttctggtcgtgcaactgtggaacctaagaaggcagagagcaccacatacataaagatcccaaggataatgaagaagacggtattgagcgagattgcttctgctaggtgttgggtaattggagagtttggagcgagaaaatccttgacaacagggatatctgctctaaagatccaaaccgctactaaaccaatcacatagacaaaaatatgggtaaagatcactccgaagagtccgagcatgcgtgcgaagaaatagtcggttgctttgatactagagaaaaccacttccatgatcttggttcccttttcactggccacttcttgggctgtgatactagagtagaagatcaaaatcatataaagcaacattcccaaaccacctgcaaccatggtttgcaccattttcaagccttcttttttctcgtcaattttttctttcagagaaacctgttgagacaaggctgtcagttgctctttgcttagattagcacgggccatattgatcccctgttggacttggcttaatttcgcagcgacaagggttttcaaatctgttttcatggcttggtcgcccacataagtggcttctagctggccatctttttcatcgaccgttaggtaagcagctgctttctcatccttgatggcttttttagctgcagcttcatccttgtagtccaaggtcaagccatcagttcctttgagactttctttgacagctggaacttctgtcaccaaggccacttggtttttggcatctgtagaagaacctgtcagataaccgattccaatgctcaatcccaaaaagaggaaggggccaaagaccatgaagaggaaactccatgatttcacttgtctgatataggtttctttcattacgacaaacatctgtttcatacttctactcctgattcaagtttaaagatctcatcaatagttggggcttggtggtcaaaggtcgcaaggtagtggcccttggtcaagcggtcaaataattctggaccagctgacgcatcatccaagatcaacttccaagtcccttgcttggtcatgctgaccttggtcacgtgtggcagagcttctagctcttctttgctaaagtcgttagagacaaagaggcgagtcttgccatagctattccggacctcttggactggccctgaaaggacaaccgaaccatcacggatcattaggatatcatcacacaactcttcgacattggtcatgacgtggtcagaaaagataatggttgccccacgctctttttcttcaaagatgacctgcttgagcacttctgtattgaccggatccaagccgctaaagggttcatctaaaatgatcaatttaggctcatggatcaaggtgatgatcaattgaaccttctgttggttcccttttgagagactcttgattttatcggtcaattttccttttacttggagtttttccatccaggtcggtaatttttccttgacctcagcagtgctcattccttttaaggcagccaaatagcggacctgctcaaaaatcgtgagttttggcataagactacgttcttctggcaaatagccaatttccttgtaggtttcttgggtgatcgctttaccacctaggcggatctcaccgctgtagtccaaaaagcgcaagatactgtggaaaatagttgttttcccggccccatttttcccaactaagccaaggatatgcccttgttgagctgtcagatctactccgaagagaacctgcttattcccaaagcttttttctaaatttctgatttctaacatagatgactcctctactctttataataacgtttggtaatcttgtactgagagaccaagatatagacataaatcagtgataccactactaatgctaacaagatatctgtatggaaagcaatgccaactaagaatatcgcaattaaggaaatcggtaagatataattgcttaacttaatgataatttcatagttttcctcgtagctaatctgcttttctgcttcatccatcatactcatcataaattcacgcacttccttggcattggcattgcggggaatcggttttccataaatcagatggaaggtcttgcgaaagaagatatccgataggaaaaatagggcaatcaagacaagaaagagatagagcatggtaaagtctccaaagataaaagccatgtccccagcgccaggtctatctaagtaaaccaattgactataaaaaatgacgaataaaaagtagggcaagatcatgatgcctttaaaaatggtcgctaagccatatagttttttcttctggatgtcatagtgataggcttcatcatcgtcttctatttggagcattttttgatggacttttctcgcgcacatcagtaaggttatcgtgagtataaatgcgaccaggaataaaactgctgagcccaaaaggagtacttctttactaaagaaggattggatttccaggggcttttcggatccaaacattcctgtcaaaaaactgataactcctccgatcaagccggaaacggtaatgattccgacatttctccaaaaacggtaacgtggggttcgttctttttgttgctttttcattgttattcctcttcctccactagactaaagacattttccaccggttccttgaatatctgggcgatggtgatggcaatgataaccgaaggggtgtactcccctctctccaagagactgatcgactggcgcgagacccctgctagcttggctagctcagattggttgagaccatcacgcgccctcagctctttcagtcgattttttaagatcatggctttcgcccccttatagttgaatatcttgaatatcttcgatacggactaatttggtttctttttgttgcttattggtctcacgactcaatttgacccaatcttcatcgatatccataatctcatattcggttccaaatccatttactgtcaccttgaccgtttggccttttaattcttctaaaagtctagacatttcttgatttcctctcacttgtttttctaatcttttaatacgtttgttcaacttttttatcttcttttctgagcttgcataaacgataaccagaaaagggataaatagaatccatatagctcccataagaatacctcctcttctttcaactaaaaacattgtaacacttctttttatttttgacaagtatatttgtcaaaaaaataaaaatatttgtcaaaaatagaaagatgattgacatggatattttgagtacttaaaggaatttctctattttaatagggtttcaaggcctataacttgcaaatcctgtaagaaaaaaacagttgagaaattctcaactgtttcatctttttacaatttaccgcacttctgcatcgactttttcttcaagtgaagcttggattttttccatgtagcgtgcgacttcttcgtccgtcaagctatcttctggattttggaaggtcaaactgtaggccatagacttcatgccaagtcctagtttttcacctgagaagacgtcaaagagtttgatatctgttaagcgtttcacgccagcagattgaatcgcatcaaccacttcttggtgagtcacttctgctttgaggagaagggcgatatcacggctcactgctgggaatttggtgatttccacaaaggctgcggctggttgaagggctgcttcaatagcagataagttcaattctgccacataggtttctgggatatcataagccttagctgttacagggtggacttgtcctaagaccccaatcacctgatcaccgagtgagatcaaagctgtacgtcctgggtgaagactcttgatctcttgcgttgcggtataggtcgctttaagacccaagcgagcaaagagggcttccaagattcccttggcatagaagaagtcaacagggactgctggtgtttggaagtctttttcagcgactaagccagtcaaagcaaaggcaaagctgttgatttcatttggcaagtcttcttttggatttcctgtttgctcgaagacctttccgatctcgtagagggccaagtctttgttcttacgagccacgttgtaagcaacggtatccaaaatacctgaaaccatattttgacggaggactgaacgatccacagtcattggccacatgagctcagttaagttgcttggtgtaggcgtaaattcaatcgctttttcaggagttgtcaaagcataggtgatgatttcagtcagtcctgccccttcagcaatggtacgaactttacgacgcaatttttgagtaacagtcaattcaccggctgtcccatcgtcttttggaagggttgctggtaatttatcataaccataaatccgagcgatttcttcaaaaagatccgcttcgatagtgatgtcccaacggcgacgtggtacgctaacagtaaaggcttcagcgtttccagaaagtccaaatccaaggcgacggaagacatcttcgacatcggcataagtaagatcagtgccaaggacacggttaacatctgcaagagtggaagaaacttctacatcagaagtatcgagctggtctgctgaaacgattcccttacgaacagtggcacctgcaagctctgcaatcatgctcgctgccgcatcaagggcttcattgacagttgccacattgatccctttttcaaaacgtgaagatgattcagaacgaaggttgaggcgaccactagtcttacggatcgatttgccattgaagacagccgcttcaagaacaacacgagtagatttttcagagatttctgtagcttctccacccatgacacctgcaagagctactggtttgtccgcaaccgtaatcacgaggtcacttgcttctaactcacgctcttccccatccaaggttaccagtttttcgccagcacgcgcttcacgcacacggatatcagttccttcaaaggtatccaagtcaaaggcatgcatcggttgaccaaagtaaagcaggatatagttggtcacgtcgaccacattgttgatgggacggatgccttcattcatgaggaggttttgcaaccattgtggacttggggcgatggttacattgtccaagatacgagctgcataataaggagccttgtctgtatcaatgctgacagtaagagcatccgctgcagcttggtctgtttcagtcaaagcaaagtctttgaaattgactgccttgtcatagatggctgccacttcatgtgcaactccacgcatagaaagagcgtccgcacggtttggagtgatggaaagttcaataatttcatcatccaagtcgaggtaagagaaaacttcctcacctggaacagcttcttctggcaagatttggatgccatctgcaaattcttttggtacaacagaatcagaaatgcccaattcaccaagtgaacagatcattccgagagattccaaaccacggattttcccttttttaatcttgtagttgtccgcgatgcgagcacctggaagagctaccatcaccttgatgcctgcacgcacatttggtgctccacagacgatttgacgggcttcttcttcacccacattgacttggcagacatgcaagtgtgtttctggcacatcttcgcaagacaaaacttctccgacgacaatttttgagagaccagcagcaggtgattccacaccttctacttcgatccctgtggttgacattttttcagccaactcttgtgatggtacatcaatgtccaccaattcttttaaccatttataactaactaacatatgtaagataccaagggccaaactgaaatctaaatgactttcctagatttccttaagccctagtttagatcctttcattttgtgttttccagctcgaggctagcttaggtaggtctagtaacctccccttctctaaaatagaagtttcttgctccttctagatcaatttctttctcaacaaccagtctgtatccacggtatctccggttatatactggtgttcactaaatcgttcaaaaccaaagcggtagtaaaaatcttgcgccttaaaattacgctcccagacacctagccaggcccattcaaagccacggctcttggcttgatccagcgcaaaggtaaacatttccttgccgaaaccagccccttgacattccttcttgacatagatccgttggatctcaaaggacttgtccatctctactggctccgtctgtgcttgcccccaattgatcttgagaaaaccacagatttcttgttcttcattgaggacaaaatagatttcagattctggatctagcagatccttctcgatttgctccaaagagagcacggtagagaagtactcttccaagtcttcctcaacaatatagggaccaaaggtctcccgataggtttccacctctaggtcacgtaaggtctgtaattgatcgatttttactctaactaacatgattatttaaactgttctgagaagcgaacatctccttgataaaagccacggatatcattgattccataacgaagcatggctacacgctcctgaccaagtccaaaggcgaatcctgaatagactgtcgaatcaatgccactcatctcgagcacgcgtgggtgaaccataccggcccccatgatttcgatccaacctgtcttcttacatacattacatcccgctccaccacatttgaagcaagatacatcgacctcaacggatggctcggtgaatgggaagtaagaaggacgcagacggatttgacgttctgcaccaaacatcttttgcacgatcaactgaagcgttccttgaaggtccgccatagaaatgttcttcccaacaaccaagccttcgatctgatggaactggtggctgtgggtcgcatcatctgtatcccgacggaaaacacggcctggagaaatcattttcaaaggtcccttgctaaagtcatgcgcatccattgcacgcgcctgaactggtgatgtgtgggtccgaagcaagatttcttctgtgatatagaaggtatcctgcatatcacgagctgggtgatcctttggcaagttcatgcgttcaaagttgtagtagtctttttcgacttcaaagccatctacaacttggtagcccatcccgataaagatatcttcgatttcttcactggtttgggtcaagacatggcgatgaccaactgcgactggacgtcccggaagggtcacatcgatactctcactagctaatttggcttggactttcttttcttccaagagcttagctgtttcttcaaaggcagccgtcaaaacatcacgggcttcattaacgtgtttcccgatgaccggacgcatctcagcagagacatctttcatccctttgaggatctcggttagagagcctttcttcccaaggacagagacgcgtagctcttgcatctcttttttattttcagcagagatctgcttcaaggctgccagcgtttcttctcgaagcgcttttagttgttcttcaatcgttgacatatttcctccatcatggtcctcactcagacatagaaaaaaccacgcgccacatccatattcggagcgttgacacgcggtaccatccgttttttatctgaaactcagaccttaatttctaaatccttgcgcaagtgaattcactcagctttcatgcaaagagctttcagtcacggctcttctccctgttgcacttcccttgaggtactagtcttgcagatttctattcaattccattctagtttatcagatttttagttaaaaaacaagttagatgagactaatttcaatagaagaaggaacaggacgcagggcattatctatttgcctggtctgcttcatctgctttccttttcaatagaagagttgctgcttggttaaaaccatcacaccagttataccattttgcttcatactcatcttgaggtaaaatatgatgttttaaatccagaatagaggttatctttctttcctcacaagcttgcgcatagagatgatagatttcatcactaccatctttatcaaactcagcagaaatcgtatcccgacctgccaataaagcctgataagccctgtgatgcccgtctgtaatcaagaagcaatttccaaatgtaagaatactaattggatccatattaatgatttctgtcgactgatcaagcatctggatatcatgtaacttcttttctgataagtatagttgggtcggatgaagatccgttagcttgactttcatttctttctcctcaaaggtcccgattgaaagacctgccaaagccaaattctcctgccactcttgtgattcgtttcgtttttatttaatgacttgtccagcatctttcaagacagattctggaatagtaatgcccaattcatctgcgacttttttattgatgacagattttccttggctaaagatttcaacaggtgtatccgcaggtttttgacctttcaagatcttcgcagccattttaccagttgctactccaagatcatgttggtcgacaacgactgaaccaagaccaccagcttctaccatagctgtcgcacttgggaagattggttttttagctgttttgttggcttcaacaacagttgagaaggctgatgcgatggtattatcgattggaacccagatggcatcgactttaccagtcatgacagaaactgttgaagcaacttcgtttgttgaaggtacagagtaaggaatcaccttgaaacctgctttttcagccaattttgtaaattcttctacttgagatttagaattgtcttcactggttgagtaaagggcaccgattgttttcacgttcggagtcaattctttgatcaatttcaattgttgctccgttggattgtggtcagatacccctgtgatattgccacctggttttttcaaatctttgaccaagtttgcaccgactggatcggtgatggctcccatgacaattggtttatctttagttgcactggccaaaccttgagcagatggggttgcaatcccaatcaagacttggttatccttgtctaccaattgtttactcatggttgcaaccttgttttggtccccttctgcattgaggaagtcaatgtccactttgtccttgtcataaccttcttcagccaaaccatcttgaattcccttgtagatcaaatcaagcgaagggtggctgaccaactgcaagaccccaactttagctttttcattgctagttgctgccttgttatctttgcctgctgtagctgaatagatcgctgtcccaatgactgctgctgcaatcaaaccaataattcccattaaccgtttatttttcatttttaatacctcttctattttttcattttcttctttttcctatcatctaaagactgcgacgccatcgtttcttcatatcttttctcccttctcatctaaaacaaaaaacacgcccacacatagcaaaagctatgtgaggacgtgtcatcgcggtgccacctcacttatgggaaaaagatagtctccccccatatctctgtcttgtctagcaacaagttgcacgataaggtgtgccaaccgaatttttattgtttcaaattcatctcatcattagtccaatttcataaactgccgctacccactctcagcaaccgtaggctctcttgaaactttcatttactacttttctaatttcttacattttaaaattttctttcaaaaatgtcaatactttttctgcatttttttgaaaacgttcgcattttctattgaacatcctcttgcttctttctgggatttccgctctaattttgatataatttactagaataaacgctagaatgatgaggaatcccatgtcttttgatggattttttttacaccatatggtgcaagaattgaaggccgaactcttgagtggtcgcattcaaaaaattaaccaacctttcgagcaagaattggtgcttcaaatccgaggcaatcggaaaaaccaaaaactcttgctctctgcccattctgtctttggacggattcaacggacccagaccaactttgaaaatcctgcctttcccaatacctttattatggttatgcgcaaatatcttcaaggcgctgtcattgaagggattgagcaaatggagaacgaccggattcttgaaatccgtgtctccaataaaaatgaaattggagatgccatttctgtcagcctcatgatcgaaatcatgggcaagcacagtaatattattctcctggaccgcaccagcaataaaatcatcgaagctattaaacatgtcggcttctcacaaaatagctaccggaccattctccctggatcaacctatgtagctcctccgaaaaccaactcggtcaatccttttacaattggagatgaatccctttttgcccttcttcacaaggaagagttaaacccaaaaaaccttcaaaaatgtttccaaggtttggggcgagatacggctcaagaattagccaagcgacttgagacggatgaaaaattaaaaaccttccgtgcctttttcgaggcaccttctgagccacgcctaacgaccaaatccttctcagctatcccctttgcggatgcgtcgagtcaaacatttgaaacactttccgatctgctggatgactattaccgagacaaggctgagcgcgatcgggtgcaacaacaggccagtgaattaatccgcaaggttgaaaacgatcttgaaaagaaccggaaaaaattagccaagcaagaagcggagttagcggcgaccgacaatgcggaagaattccgccaaaaaggagaattgttgacaaccttcctccatcaggtaccaaacgaccaagaccaggttgttttggataattactataccaatgaaccgatcaccatccaactcaataaggccctgacccccaatcaaaatgcccaacgctacttcaaacgctaccagaagttaaaagaagccgtcaaacatttgaccatcctcattcaagaaaccaaggaaaccatttcctatcttgaaacggttgaaacagccctttctcaagcgagcctagctgaggtggcagagattcgagaagagctaatccagaccggctttatcaaacggcgcaaccgtgaaaaaattcataaacggaaaaaaccagaaaaatacctggctagtgatggaaaaaccatcattttagtgggtcgcaataatctgcaaaacgatgaactgacctttaagatcgctaaaaaagacgagctctggttccatgcaaaagatatcccgggaagtcatgtcgtcattacaggaaatctaaatccatcggatgaagtgaagaccgatgctgcagagttggccgcctactattccaaggcccgtctctcaaacctggtccaagtagatatgatcgaagccaagaaactcaataaaccaactggtggaaagccaggttttgtcacctacaccggccaaaagactctgcgggttaccccagaagaagaaaaaatcaaagccatgaaactaacggactgatttcaaaaataaaaggttgagcgatgctcaacctttcgtattgaagataatgttatttaagaaactttccttaggtgagaacggacgtcagcgaacttcaaagaagttccatgacttagttttggacctaaagttccaaaactcccgagtgcttgaaatgattatatttcaagcacttttctcacggcggaaagtttcaatatatgttgaatgagcctaaaagtatacctcattttatttttcagcatacttagaacagtttgtctacattctaaaaggttgagctacgctcaaccttttattctgctttattgatgtcttctttgacctcatcaacattgaatttggcaaagaggtactgacggtcttggactgggaaacgttgatccagctgatcgatggcccccacctctacaatcccttctgtgatgacaaaatccatgacatggccaccaaaggtgtggtcatctgaaataaagtgcaaatgataaccagccacgctcacgccatggaaaatttctggtgtccaaaaaccgacgatggttccagtaacattttctcgtgtatactctggctgatgggtggcaacctctgcaaacttcatctcaggtgttgattttggaatcatacggacatgcatcttggcaaagtcaccatgaatcttaatggagcggaaaagattttccccatcataataagactcaatacgggcttccaattcctcgtctgtcatttcaaaacgttggcggaaaatcacttctgcttggtgagggacgactgctgcataaggaacctttgcatccggagaaacttcgactatttcaggatggtcccctgatcccttggcctgatatgccttaccatctaaaacgatcaactctccatcaatagaatcaagcgtcccaactccgagatctccgtgttccaagagttctccaatcgtaaatgaacccccgtacagacccgccattagggcacctaaggtattgtattgaaaaagtttcactggttccatgtttttctctcctcattctatcttctaccagtataccacaaactattccgaatcttcacgatatggttttgattagaggctatcatagagggtttgcatctgcacatcgtctggtacgatggccaaatactggttagccacttcacgcgccttcgtcacatctccagcctcacgcaacaaataaacataggcttcgaggaattctgggttgtcctttaaatcctcatagagctcttggtaggctgagacggcctcttctgttttctccaaggcagccaaggcacgggcaatgttccaccgagtgacaactgtttcgacttcttcattttgccaagccaagacttggtcaaagcgttcctgttccaaataaagagtggtcaggcgaagagcaatctcttcgagatcatctgccacttctttagcctctaatagataagcttctgcttgctcaggctggtggagttcataggaaagctgagaagcaaggagcttcaattgggcatcaaatggattcttctggatcccttgtttagcaatctcaagcgctttttcacggtcattttcagcctgtaaagccaaggcataaccgtactcatagccctcaaaatcaggcgacaaggtatcaatttgtttgtagtagatcagggctttttggaattcttcttggtcagacaataaggtcgctaattcgtaagcaatctggtcatcaaattcaatctccagagctttctctaagaaaggaacagctgcttcaaacttaccaagattggcataggcaaacccaattcgttgataggtggaaattcctgttgcttctaaaatctcccgattgtctaactgggcatactcttggatagcctcttggtagcgttccaattccagatcaatttcagctagccctaattgaatgatcggatcatcagacaaatgagcagcttcaactaatttttcacgcgccacatctgctaggccttccatctgatagagatccgccttaaccaagagactggccacataccagtttgattcaggtccaatttcttctaaataagcaaaggcctcttccgtttggccttcctctgcaaggatggttgccaaactcagatacacttctgggtaggtttctgcaatctgttcatagatttcttttgcctgagggtaaaaaccgatactttcaagatattgacctaaatccaataattgtgcttcactatcttctaacaaagcctgttgaaattgaacttctgcctcttctagctcttgccgatcgagagcctctaccatttgttgactatgactcactgtgtgtttcctcttctacttcattgtgttcttcatacaagccactgacgaccttataccattcaaagatagctccaatcaccaccttagcagatgcatagactggaattccaaggaaaactccccaaattccaaacatagatcctgacgtcaagagcacaaataaaatggtaattggatggatatttaactggcttcccaaaaccaacggtgatacaaaacgtccttcaatggtttgctccactgcaaatacaatcaagaccttgataaacatctctggtcctgctaccaagcccaataccaaagcaggtaacatggctaagaaactacccaagtaagggatcaaattcaagatccctgcagagatccctagtgtcaccgcatagcgcaagccaatgatcttaaagaagatgatgaacataatggcgacgacaatggctaccgtaatttgccctcgaacgtagttggagagttgggtattgacatctgagagaacttgttcagccgatttacgaatcttagtcggtaagaagcgaacaatgtggccctttaaattttttccatctcgaagaagataaaagacaataaaaggcatgatgatcaaggcaacaataacttgcgaagccactccaatcaagttgctgacccaattgacagcccgcccagagatcgaactcgcccaagaagtaatgtttgcagacaattccttggtgatctcatctaattggggtttgatatcagaggagacgcgattatctagaaaatcatcgatggttgcattggccttttccaaataagttggcaggttatgaaagaaactcaccacttgtcgttggacggatggaatcactacagctagaccccaaattaaaagcactgcaatcaagaaaaagactaaggaaatcgcaaaaatccgcttgagtccttttctttcaagaaagtcaacaatggggttaagcaggtaatagagcaaaccagagataataacaggcagcatgacggctcctgcaaactcaaaaataggaataaaaataaaggtgattttactcaaaaccaaaaggttcaagcccaacagcaaggtaactaaaaatacggtaatggccttgttgtctaaaaaccatctaaaaaaccaggacaaactaaactgtttttctttattatccacagagaactccttttcatttcaatctgtttctattttagcattttttgagcttgaagttacgaaaaaactagcaaaataagaaagaaaggccctccccttttcaactagcaattgccttccaataggacctttgatataataaacctaacaaatcatacgaggtgacctatgtctcaaaccatttatttcggtacctataccaaaaaagaatccaaaggaatatacaaggcacaatttgaccctaaaacagggacattgaaccatctggaactagtggcagctgagcccaatccaacctatatcgctttttctgaaaaaggcaacctctacagtgtcggagctgaagagggaaaaggaggaatcgcaagttttacagctgattttcagccgctcaatcacgtcgttgaagagggagcaccactctgctatgtctctgtcgatgacaagcgtcaactggtctatggagccaactatcacaaaggccaagttctcgtatataagctagaggcagatggacgtttgtcctttgtcgatcaagacacccaccaaggaagtggtcctcatgccaatcaagcaagtccacatacccactatgcagacctttcaccagatcagtacctgatcacgtgtgacctaggaacagacagtttgcatgtctatgatgtcagtgagcaaggaaacctaaccctgatcaatcagtaccaaacagttccaggggcaggacctcgtcacctggtctttcatcctcactataagactgcttatctcatcaatgagttaaatgctacaatcgatgtactcttttatgatggtatgggtgaattcgaacacttccaaactgtttccacacttccatcagactacgatggtcaaaaatgggcttctgcgatcaagctctcagctgatggaaaattcctctatgcatctaaccgtgctcacaattccatcgctgtcttcaaagttgtggctgatggtagcctagaactcattgaaattgttccaactcaagggctcaatccacgtgatttcacacttagtcctgatcaaaaccacctaatcgcagcccatcaagattcacctaatgccaccgtcttcaagcgggatcctgctagcggaaaattgacccttctatctgacgacttctatgttccagaggccgtttgtacggtttttcattaagtcgttttagttgtcaaacctctaaaaaaatgattaaatagatgagaaaaaggcgcgagcctgacttcacaacttatattttaggagaccctaacatgaatccattggacttatttaaccaagttaaagagatgatcgaaaagaaagatttcgacgctgcaaagaaatttgttgatgacaacaaagataacctcggtgactaccttgaacaagccaaagggcttgtatctggaaatgaaatggtcagcggtgccttggacaaaatcaaaggcttgttctaataagacgatgagagtgggacagaaatcggtcattcgttagaattcgatttcgtcgtcccacctccgcacagtagagcccactcaaccactgcgtcttgctcgacaatccaaaaataattgagaggccaggacttttgtcccagcctcatttttgtttaccccaatcgcaaaaaaagatccttgagaaaactcaaggatctttttagtctagtaaactagcttatttcttaaggttgtagaatgatttcaatccacggtattcagctacttcaccaagttgatcttcgatgcgaagcaattggttgtatttagcgatacggtctgtacgtgaaagtgaaccagtcttgatttgtcctgcgtttgttgcaactgcgatatcagcgattgttgaatcttcagtttcacctgaacggtgtgatacaacggcagtgtaaccagcttctttcgccatttcgatagcgtcgaatgtttcagtaagagtaccgatttggttaactttgataaggattgagttagcagcaccttcttcgatacctttttcaaggtaagaagtgtttgttacgaagaagtcgtcaccaaccaattgaactttaccaccaaggcgttcagtaagagctttccatccgtcccagtcgttttcgtccataccatcttcgatagtgatgattgggtatttgtttaccaattcttcaaggtagtcgatttgttcagcagcagtgcggacagcagctccttcaccttcgaatttagtgtaatcgtaaactttacgttctttatcgtagaattctgatgatgcacagtcaaatccgataaatacgtctttacctggaacataaccagcagcttcgatagcagcgatgatagtttctacaccatcttcagttccgtcgaaacgaggagcgaatccaccttcgtcaccaacggcagtttcaagaccacgacctttaaggattttcttaagtgcgtggaagatttcagcaccccaacgaagagcttctttgaatgtaggtgcacccgcaggtacgatcatgaattcttggaaagcgattggagcatctgagtgagaaccaccattgatgatgttcatcattggagttggaagaactttagtgttgaatccaccaaggtagctgtaaagtgggatttcaaggtagtcagcagcagcacgagctacagcgatagacacaccaaggattgcgtttgctcccaatttacctttgttaggagtaccgtcaagagcgatcattgcacggtcaatagcttgttggtcacgaacatcgtagccgatgattgcttcagcaatgatgttgtttacattgtcaacagctttttgagttccaagaccaccgtaacgagatttgtcaccgtcgcgaagttctacagcttcgtgttcaccagtagaagctcctgatggaaccataccacgtccgaaagcacctgattcagtataaacttctacctcaagtgttgggttaccgcgtgagtctaggacttcgcgagcgtaaacatcagtaataattgacatttcttactctccttattgagttatattttttactcctctatcatatcgtaattaggctattttttcaagaaaaaacaaggaaatctacgaaaattgagaagtttttaacaagaaaacggttccactttctttttttcttctatttccctccttatttaattttttcgcattcttctattcttctgctgcgctttatgctatactaagcttatgacagatattaataaaacaattttagaaaaagctgctggtcctactcgattcaatccggatgagcaacgtcgatttttggagacttatgaggagcgggtgattgcttcatgcaccttggaggaggcaagggacaatctctatttggagcactattcttcaattcttacgaacatttcagaacgctttgaacctgtattggtcaagatttcgcctgccttagatgaaagtagccaacttcaatatttgaaaaaaacaaaggatcttggtcttgtggcaagcattgtttcagatgactgtcgccactctccctttggtctcatcatccatactgatcatccatctggaatttctccaaccgatatcagcctccagtatccaaatttatttgaaaagaaagaagagagcacagcacctgaaaaaaaatcattttggaaacgcctctttggctaaagaaagaaccaattgaaaaggaaattccttttcaattggttttttagtttgctttcatttttaagaggttaccaatatttcgagcacaggaaatcagatttttttcagcatgagtgagtgcatctgccacctcacaaggacctggcacaatagagaaggcagcctcaatatgatgacttgggaatgctggcaaatcgtccgctaagctaccacaaatagcaagcactgggatcttatctggtgttcgtttggctaccccgacaggagcttttcccgacagagattggaggtccatcctaccttctcccacgacgaccagatccgctttttgaaccttacgatcgaagtcgattagatccaaacctttctcaattcctgaggaaatctgacctcccgcaaaagcgaccaagcctgctgccataccacctccagctccggcgccagccatagacaagattcgtggatcaactagctgataaaaattctccatagcttgatcaactgctggaaacagaaggggattcaattccttttgcccgccatagatataggttgctccttgactgccacagagaggattggtgacatctgttaagacttggagctcgatgtcttgtaatgcgtttggaaccgcactggtatctattctagccacacgatcgagtgaagcaccaactggacgaagcagatgaccttggtcatcatagaaggctacccctagtccggctgccatcccaatcccaccatcattcgttgcagaaccaccaattcccacacagatcgttttaaccccttggtcaaccaattgcaaaatcagttcaccaattcctcgtgtctctagttctagtggattgcgtttttcagctgggatagagcctaagccaacaagagaggccatctcaaaaaatgccatctcatctttttggtagtaagccattgaaacaggcttcccaaatggtcctgttacctgagtatgcttcttggttaaattcagaactccagcaagtgtatccatggttccttcaccaccatcccctatgggaagaaggtcaaaagttgcatctggtagagcctcttgaaatcctttttttaaggcttctgctacttgtttggcggataaggattctttaaatgaatccggtgctagtaggatatgcatgctgtttcctttctatgctggtctagaatttcaagaacaaggcttagatcgctcgtttcaatacggtatggagctcgttcggctacgattggctttgccataaaggcaatcccgattccggctgtttcaatcatgggaagatcattggcaccatctcccatagcaatcgtctgacttcgttgaatatgattttctctcgcccatgtcaggagggagtctttttttctttcaggggtcacaatctctccgagcactttccctgtcagacggccatcaaaagtctgcaaacggttggcacgaaccagatcaattcctaaagacctcgcgataggatcaatgacttcatgaaatccccctgaaacaaggccaaccttgtaacctctttgatgaagttccgtgattaaggtcttagctcccggtgtaacgtccatctgctctataattttcggaaaaatagaggcctctaaacccttcaataaagcgacacgcgcctgtaaagatgctttaaaatccaactctccattcattgcttgtgctgtaatctctgctactttttgtcccacgccagcttcttgagctagtaaatcaattccttcttgttgaatcaaagttccatctacatccataacgaggagacctgttacttctttcatcgctttcctttcttatttctcccttactatacaaaaatagggtttaaatttcaagtttcaatgatcatttgaagataaaaaaaacgacctcctaaaaagtcgtttttttgttattagaagcgaatttgctcccgagttttttcataggaagtaacaaagcgatctgttacgccggattctaccaattccaaagcatttgagataaccttaaaagaagctgcatagtcatattctctttcgaaaatataaagggattcatcaaaagctgcttgcacatgatcatcaaatgaacggtaacggtttgagtattgcaacaactgctcggttaaagtagcattttgtacaattcgataagtcgcttcttccaattcattcatatcattggtcaaaatatctaacaaacgattggttgattcgatgttgattttatccccttccaactcatccatcaaagcctctgtattgttgcttgctgtgaagaataattccaagaattcttgagggattcctggcaagtttcgcttgtccatatagcgtttaatggcatgcaaacggttggcatagatgttgactttttggcgagcattggcatcgtctttttcaatttttgaaagggaatcacttaagctgatttgctcatcttcgatttctttcaagcgagcctcaatagcttctaactcttcttctacgatagaataagctttttgtgtttcagatgaatctttcaaggcatcttctaccacattttcttgtgaagatagctcagcttctaactcttttaattgttgactgaaagcttcattcaagacgaatgttttactaaggcgttccacttctgctgcaaggttgctattgttatcttttgcgtgtttcaaatagccaggcagttgtttcactaacttcttcacgactttttgtgattcaatttcacgagtaaagatgtgatacaatgcatcgatttcctcttgaatttgctcattttcgtaaatagcattgtccaattcaagcgcggatacatttgctatattgttcttcaaggaagcatgcaactgttggaaacgagattcaatatctgtttcagtgaagtggtatccagattccaaaagcttgcggtagccactttccaaatcctctaattgatcaggaagttttgtttgaagagcagtgacaatttctggcactcgctcaacaatttgttttaaggctacaatatgattttcagctgtatcaaggatttcagccgcttcaacagggtcacctgaagaattcaaggttacaaattgtgaaaactcagattgaatatttccaatttgtttttcaatttcaggaagcgcactgccataacgatctgggtctgaagtgacttctttttgaagttcctcaaacatatccaaggcatgaaccacacgtccgctattcttttgttcctgctcttccagatcagaaagggctttgcgaatcgccttgatatcttcgtcgatcaattggatctgactttcgatattatcaatggcttgtttagccttcatgaaacggaaagaattgttatagccttccgcttcaaacagattgttttcaatatcagcaaatgaatttaaggataaatctacccatttttgattccattcacgaaatgcaatttgactttgaccaatcaaatgcatgttttttacggcctctacttcatcgttgaccggaaggttgtataacttttcttttcgttcttccagtgctgccagtaaggcttcatttctttttctcaaaatgactgcaaccacatatcctacaatcaagataagggcgacaataaagatgagaacaattagtccactagacatataaaaactccttcatcgtattacttgaacgtaatcctagtaattataccataaaatatccattaatgggaagcgttcggtgaattttatacatcgagtgtactatattcagcgttttcttcaataaattcccgacgtggttccacgcggtctcccatcaacatatcaaatatcttatctgcttccgcagcatcgtctactgatacccgtgccatcaagcggtgttcggggttcatggttgtttcccataattggtgatcatccatttccccaagacctttgtagcgttggatggttggttttgagcgaccttctgaatagcgttccaaagctgcagctaattctgcttcttggttggcaccaggttggatatattctttgatctcactaccgactttgaccccatagattggtggttgcgcaatataaacatatcccgcttccaagactggtttcatatagcgatagatcaaggtcaacagaagggttcgaatatgtgcgccatcgacatcggcatcggtcatgatgactaatttttgataacgcgcttttgtgacatcaaattcagcaccaaatccagttcccatagcagtaaataaactacggatctcttcattggcaagaatcttgtccatactggccttttccacgttgaggattttcccacgaatagggagaatcgcctggaactccctgttccgacctgatttagcagatcctccagccgaatccccttcgacgatgaagagttctgtttcttgtgggttgtttgaagaacagtctgccaatttaccaggcaggttagagatctcaagtcccgatttcttacgggtcacttcccgtgcccgcttagctgctacccgagctttagctgctaaaatccctttttcaacgattttcttagcgatttgtggattttccaaaaggaaatcagaaaaggcatcactaaagagtcgattggtaatttttacaacttctgaatttccaagctttgtcttggtttgtccttcaaactgtgggtttggatgtttaactgagatcactgctgttaaaccttcccgaacatcctcacctgttaagttgtcttcattttcttttaagagtttatttttcttagcgtaatcattgatgacacgagtgagggctgtacggaaaccttgctcgtgggtaccaccttcatgggtatggatgttattagcaaaactcatgacggtttcatggtagcccgtagtatattgcatcgccacttcaacagtaatatcatccatttccccatctgtatagatgggtgtttcaaagatgacatctttattttcattgatgtattcgacgtaactagagatcccaccttcgtagtggtaatgcttttcctgctctaagccttcgcgtttatccgtcaaagaaatacgcaaaccacgattcaaaaaggctaattcttgaatccgtttgtttaatttttcaaaatcatactcagtcgtttccgtgaagatttctggatctggaataaagtgaacagttgtccctgtccgatctgtctcaccgatgactttcaaatcatccacaacttgtccacgacgatactcttggtaatggatactgccgtttttatagacgcgaacatcgagggatgtggaaagggcattgacaacagatgaccctaccccgtgaagaccaccagaaaccttgtagccacctccgccgaattttcctcccgcgtggagcacggtaaagacagtttcaacggcaggtcgacccgtcttttcttggatatccactggaattcccctaccatcatcgacaaccgtgatagaattgtctttttcaatgaaaacttcaatatggctagcaaaacctgctaaggcttcgtcaatcgagttatctacaatttcccagaccagatgatgaagaccttcttttgaggtagatccaatatacatccccggacgcatgcgaacggcttctagtccttccaagacctgaatctgactggcatcatattcttgcgcttgaatttcttgctgtttatcctctgtcataatttcccttttctattcaaatataaactggtgtaagtggggcatggtatcaaataaataagttgtcatccctgctgccttcccagcttctatatcaatcggacgatctccaatgaccagaccgtcttgaatgccatatttttctttcaaatagagcatcgaggttggatctggcttgcgaggaaagccctcgtctgctgttacaatctcagtaaagaagggagcaatgcccgtctgatcaataagggtcaaaacttggcgatctcgatgagataccaaaaaatgacgtcctccatgttcttgaatctcttctagtaactcttttgctccatcaaataaaaccggatcttgcaaacctaaggcttcttttttcttgtattccgtacgaaaattaggaatatgaggcgcaaaggtatggattgcatcctgtgttgagatttttaacgctgcataaacagaatcatgatcggcttggatatgaaagtccttcaatgtcgctacaaaggcatttgtggacgtttcgtaattatccaatagcgtcccaccaagatcccatataaaatcatgataattcatagtcaatattataccacaaatggacaaaaaaaataagctaaaaccctcatttaggggggattttagccattttttacggtcatttcatcttaaatcaaataaaactcattttacactataaaaagtgatctatcaccagaaaccgttgtgtccaaaagagcccttttatgcacctccaaagacatcctgatagagcattccttgccgaaggctttgggcatctcctccaaaatgatccaccaaggcataagctaaggcaagggctgttgaaggaccacgactggtgagaagattaccgtctttcaccactgtttctttctgatagtgcccatcttgaatctcttcttcaaaaccatcgtaacacgtatagtgtttatcttttaagaggccggcacgcgccaagacaattggtgctgcgcaaatcgcagaaatgatttttcctttcctactttcttcttggagagctgcaatcaattccggattatcccgcaaattcgcagctcctggcatcccacctggtaagaagattccatcataatctgacaggtccccattccagaggcggtcgacttccactgtgatctggtgagaacctgtgaccgtttcttccatgccaataaggtcacagtcgatcccagcccgtctcaaaacatcgacaatggtcaaggcttcaatttcttcaaaaccgtttgctaaaatcgttgctacttttttcattttcattccttctttctatctattgcgcctttttaagaactacttttttacggattggaggcccttcttctggctctttctttttgctactatgattatatattgagaggaccagaccaataccaatcagattactaataatagaggatccaccttgtgatataaaggggaggggaatccccgtcaaggggagaagacccgttactgctccaacattttcaaaaatatgaaagaccagcatcataataaatccaatggaaatataggtataaaattggttattggactggagggtaatttttaaaatgcggtaaatcagggtcacatataaaatcaacagcaccagagctccaacaaaaccaaagtcctctgctacgaccgtaaaaatcatatcactctcccgtacgggaaccaataaattggagacattaaagccttgcccaaagagaccaccacttgcaatggctagctgtccctgcgcctgctggtaggtggtggtttgtgcatagtcaaaaggatttaaccaggctaaaatacggttcatctgataggttggcatccctacttgctggtgcagaaaagcccgacccccttctgatagaaagagaaagagaaagcctgctaacccacctgctagaagcaagataaccggcaagataattttccaggaaactcctgaaacaagcactaagcccgcaaagatggccaagaatactaaggccgttcccaagtcctgctggagggccaataaggcaaaaaccggaattgtatagatggtcaactctagaattaaaaaccaatcttgtcgtaacaatcgctcacgccccttatttctttgtaaaaatcgaacaatagaacgtgacagcatcaggatgaagggaatcttcataaattctgaaggctgaaataaggtggtgtttccataagccacccagtttttagctccagtcgaagccaccaaattgggattataaaaaacaaggggaagaaccatcaaggccaggccaagcaggtaaagaaagggagtgattttccaaagaaatttcgtgctaaaaatcgtcacaatcaggcaaatgacacatcccacaccaatccaggccaattgctgccctaaaaaaggccacaccatttggggatagtcatgagaaactgctacataaacagataaaatcccaatcatgagaagggcgaagacaatcccaatgatcgaataatccaggtgaatcgtcaaaaaatgatgtttcttcattcacgttcctttctgtgagaatcatcaaatcaattaatagaacaacatttgtagaatcaagctagatcctgctacacaaaaccaagcaatcaaccctactaaaagaggggctgctcctgctgcacggaactgtttccaagaaaccttgcttccgattccgaccaaggccatagccataaagaggtgagaaaggtcctttaggtaaggaagaaccactttaggtagaaagccgatagatgaaagaatagaagccacaataaaccaaatgatgaaccaaggaataattttctttaacattcctttgtttcttccttgttgcttgctccgataccattttaaaccgatcaagcccaaacaaactggtacaatcatcagggcgcgtgtcaacttaacaatggtcgccatttcacccgccgccttactataagaaaacgctgctgctacaactgatgacgtatcgttaatggctgttcctgaccagaggccaaattgaaaattagacatatgccatacatgccctaatactggaaagataaagacagctaaaatgttgaagaaaaagatggttgacatagataaggcaatttcctcttcgtctgcttcaatgatcggcgcagctgctgcgatagcagatccaccacaaatagccgttccaaatccaattaaggtccgtaagtgagatttcagatggaagactttcccaaagatcatcgctgcaagaaaggcaactgttatcgttggcagactaatcttcaaagaagacaagcctgtagaggcaaccgtcgcaatcggcaagctaaatcccatgaagataatcgaatactgcaataatttcttaccggaccagttcagtcctggtcgtgaattctccggcaaatctactaattcattgaggacaattcctaaaatcaaagcaaagacactggagccaatgatgggaaagaaagttcccaaaaacatggcgcaaagagccagtacaaatgcaattgcaagtccaaatactttatttttcattctctcaattcctttcaaaaaaggcagctgcttgctcaacaagtcgctctctcactgtcgtgtgaaggggcaatacttgttgtaagccatctaaaatttgttttccatatcgtttggtcaccacccgctgatccaataagaggaccaacgattcctggtcttgaaaacggctggttctcccaatagcctgtttgagccttaaaattgcgactggaagactatagtcataaaagggatttttcccctgttctctgagttgggtattcagcttttgaaccatataatctttagggttatcaaaaggaaggcgcgtgatgatttgaatcacttctttttgttgggaaaaatcgactccctcccagaagcttcctgttcccaataaaatagagctttctccccggtcaaatcgtcgcttaatattagctgcatcgccatttcgatactgggccaaatgaggaaacttcaatgcgtttgacgtctccagtaacaattcttttgaggtaaacaaaagaaaaattggttttcttagaggaaggagttcatcgatgagctgacaaatctctcctgcatattccacggaagataaagaaacgacatctggaaaatctatcggcaccaacaattcctggtgttgtttgactgttattggcacccggtagatctgctgctcttgatatcctaaaagagcaggtaaatgcacctttttactgatcgcgatcgtcgctgatacaaagagcacgggtacttcttcaggcacaaactccttaaaggatagcaagtcctcaactcctccatggagacgaagaatctggtggctttcgaccacttccttgtccatccaaaaaatctggtagcgctcatcaaacaattcccttagattctctaaagattcgttttttaattccgatacatcctgtcgaatttttgccactgtttgatctgataagatcgctgtttttccttgtacaacttccttagagcaggcatttaactcaaattgaatactctccagcaaccgtcgctgcagcagatctttttcctcttcaatagcgtgttgcaagtttaaaagaagagattgcaaggtttcttctctctgtgaaaattgttctaaagcaaagaagagtttttgcgcttcatccacgaccagaacagactcttgaagtagactcttatcatcttctagacgggttagcagataagcatgattggtcaaaatcacccggctggttttcactttttcctgaccaagacgccaaaaatcttcctgataaaatagtgaacgtttcgacaattgaccatcgtggcaaatgtctgctacaaaatggacatgacgatagagttggccaatttcactgaactctcctgtttcagtcatggtcagccaaaccaacagttgcattttaaagcgtcggatcatcccattatctgactcactctgtaaggtctcataaaatttatcgagttggatataatccttgggacttttaaggctatgaaagggaatttggaaaagatcctggatggtctttccttctttcttcataatttgatcctgaagaattttagttggaacactgacaagaatgcgcttggaggttttcgccaaaagcgttaacagataagcgtaggtcttcccaattcccgttggcgcctcgataaaacttggaagcggctggtgcaaactgtcctcgatataggcaacaaattctctctgctctggataagcttccattcccaacaactgcatattgagttcaaactgttcagacaaatgacgactttctaaaaactgctgttgcttgcgcagatagagaccatgaacttctactaaatgagctggtaaaaaaaggctactgtcttcaagcgcatcttctattaagagtcgcgattcataaatcaaacaatctgccatcgaaagaagtttttcgatcaatcctcttggtaagctcgcaattttctctctcaatttcaacagcagctgggctgttgccatagcatccgctaaagcggagtgagcatggtgcaactcaatttccagttcagccgcaagcgctcctaaattgtagcgttctaaagtcggatagaaaatttgagacaattcaaccgtatcaatccgaggagtcgttagctcaaatccttcccaaaaaagggcttctgccaataaattcgcatcaaatttgacattatgggccacaaagacggcatcttctattaattcaaaaatttcttttgccacttgtgcaaactctggagcttttttcaagcgagcatctgtcaggccagtcaattgtttgatatgctcatccaatcgctcatggggattcacatccgtctcataggattgcgtaatcctaccatcttcaatgatgacaatcccaacctgaatgatcttagcattgcttccagcactggtcgcttccaggtccacaatggcatatttccgtttctgtcttgtcataatacttaaaattatatcacgtttgagcaagctctgcagatttttttctcctttcatgctgacttcaatcctgttattttcctcgcaatttgatacactattctagaaaggagtccttatgaaaatctatcgtactgttaatcctgtagcttatgaaaacacctactaccttgaaaatgaccactccctcattcttgtcgatccaggtagcgactggacgactattcaaaaacaaatagatcgcatcggaaaaccaattgtagcgattcttttaacccatacgcattacgatcacattatgagtcttgaaaaggttcgtcagacctatcatttcccacctgtttatgtccattcagcagaagccagttggttgtcttctcctgtcgataatttatctggtttggatcgtcatgcggatttagaagatgttgtatgcaaggaggccgacttcctttatgacattcgctccgattaccaaatagctgatttccacttttatgttctggagacaccaggccactctgccggaggggtttccatcgtctttcctcagaatcacctggttctatctggtgatgccctttttcgcgaaaccattggacggaccgatcttccaacagggaacgcaacacagttacttagcagtattagagaagaactctttacccttccatcttcctacactgtctatcccggtcatggccctgaaacctctattggtcacgagaagatgttcaatcccttctttagataatcctaaagaatccttatcatccttcctgtcctcatcaaagtaaacaaaaaaagcaagtgcgaacttgcttttttattatatcttaagaaaacgtctcatggagattgaagaaccaatcgccccaatcaaaattcctaatccaaagaggccaccgaccatgatcggtaccaagagatgagggctatagagatacaagttttgatctgccaagttattgttcatagatgtatagacaacattataaacataaaagaccaaagctgaaggaaccaaggctcccaagagaccgatccaagcaccttctaaaaggaatggtgcacgaatataaccattttttgctcctaccagtcgcataatcttaatctcacgactacgtgaaatgatggtaatccgaatggtattcgaaatcaagaagaccgcgatgaagatcaataaagctacaccaatcaagccccagtttcggatgaaggttccaagagcaaacaagcgttgggtatcgaccccaccatctttaacctcagagaccccttcaatttttttggcatctgctgagacttgcttcacatatttaggagctgttgtctctacataatacgcatcatagagaggattggcatctccatcaaaaatcttccagttgttcccagccgttttgatcagtttatcatactgttcttccttgctagaaaaatcaaccttatcgacatgcttcatggctgtcagagcatcatagaccttatggtagttttcattggtcacggtttgaccgtctttttcaatctgctcgctctgatcttgaatatccttgcgcatgtatactacaacccgcacactattttgaatatcatctgaaagcttaatggtattggcaatcacagaggcgaaaatagcaaccaagctaagggtaatcataaccgagctgaccgctgccatcgtcatccaaccatttcgtttcaagcttttaagcgattcgattaagtgtcggaaaaatcttctaatcatcgtatccgtactctccttccgcttcatcacgcactacacgaccattttcaatcgcgatgacacggtgacgtaaagtatttacaatctggctattgtgagtcgccatcaatactgtggtcccttgcagattaatccgctccaaaagattcatgatttcccatgaattatctgggtccaagttccccgttggctcatccgcaatcaagactttcggattgttgacgatcgcacgagcaatcgcaatccgttgttgctccccaccggacaattcattcgggaatgagcggaccttgtgtttcaatccgacaagatccaaaacttccatcacacgctttttaatattgcgacggcgctcaccgataacttgcattgcgtaagcaatattttcataaacggttttctttggaagcaatttataatcttggaagaccactcccacattgcgtcgcaacataggaatatcgcgttttttgattttatccaaatcaaaatcagctactttcaaacttcctttatcgtgtttgacttcacggtataaaagtcgaataaaggtcgacttccctgcaccagaaggtcctacgatgtaggcaaattctcctggttcaatttggacagagaccccgcgaagggccgttgtcccgttgtcatactttttgacaacatctttcatttcaatcattgacatgtaatgaaattcctttcattcttttctggttgattccctcgaggttattggagacgccatttaaggtaggcatcgataaacccatcgatatctccatccatcaccttgtccacctgcgctacttcgtagttggtccggtgatccttaaccatggtataaggggtaaaaacataggagcggatttgacttccccaggtgatttcttttttatccccttttagagagtccacttctgctgcttttttctcttgctctaattggtagagtttagcttgcaacatcttcatcgcacgatcacggttcccgtattgggtccgatccacggtggatgccactacaatccctgtcggaatgtgggtcaagcgcacccctgtagaaaccttgttgacgttttgtccaccagctccaccagagcggaaggtgtccatcttgatatcatcatcacgaacttcgacttcgatagtatcgtctaattcgggcatgacctcaacagatgtaaaggaggtatgacgacgtttagcggagtcaaatggagagatccgaaccaaacggtgtacccccatttcagatttcagaagaccgtatgcatgtggcccttcaaaggatagggttacagacttgattccagcctcatccccagcctgatagtccaagacttcaactttaaagccgtgggcatttccaaaacgagtatacatccgaagaagcatgtcgccccaatcctgagcttctgttcctcctgaacctgggtggatttctaagatggcattattattgtcataaggttcagacaatagcaaggtcatctcatagctggtcatgcgtttatccagctcctctaacttttcgatcaattcttccttgaccgaatcgtcttctgccaaaaagtccagtaagatttctgactcatcaaagagatccaccatttgatggaaattttcataggtctgcttgagttcatttaattcttgagatgtcttttgcgcagcaatattatcatcccaaaaatcaggttctgtcattttattttctaaaatggcaatttcttcttccaatgcctctaagtcaaagagaccccctgaaagaagctaatttttcacgatttgcgtcaattttttgacgaatttctgaaatgtccataagtacctctttctatgtatctagtctattatatcataaccttcactatttgcccaccttccaatattggatctgctggttgaccattgccaatccagctaattttcaacatttttccattcatttgtaacctaattgttagaaaaaaagatcctcttatgctagactggtagcatgacaacagtagcttttatgtccgatttacatattgattcaaacaactttggaaaagatgaattagagacccttatcactcttttcaaggacagaaaaattcaacatctccatattgcaggagatattgccaacggctttgaaaatacctcacaagaatttttagcccaactccaatgtcatcttcctgtgacctttagcttgggaaatcatgatatgctgggcctatcagaagaagccataagaccttttgaatttcaaaagattcccttctccaatcatacgcttcttgctttttcgggctggtatgactacagctttgttcctaccgtctctccccaaaaacatcttcaaaccaagaatctgttttgatttgacagacgcctccaacgaaggggatctgatccagccattaccaaaaatcttttgcaagagctggaacaagagctcatgcaagtggatcaacccttgattatcgccatgcactttgttcctcatagtcagtttctcctgcgccacccttattttgaacgctttaatgcttttctaggtagccaagcctttcatgatctgtttaggcaatatcctgtcagagaagtgatttttggtcatagccaccaccgaatgccagcaacaacgattgacaacatcacctatcatgctagacctttaggctatgtccgagaatgggagctctgcaaacaatttttcgaagcttttcctgaatatgatttttcaaaacgatacgatccctacaaacgctatcgcagaatcaaagacctccccgaatttaaagcatacaagaaaaaaaagctcgctcatgaattttctcaagccatggcgatccttgaactataaaaaaattggttccttcggaaccaatttttttactcttctgtatccaagagattttttgaaacgattgcagccagaacaccaccgacaattggagccaagataaagatccaaatttgttgaagggctgcaccacctacaaagagagcaggagccaagctacgagctgggtttacagaaagtcctgtaatattcaaaccaacaagaataatcaaagtcaagctcaaaccgatcacaagaccagcgatcttcccatttcctttagaagctgatgtcacggtcatgatgaccaagataaagataaaggatgcaatcacttcaaacaagaaaccgccaaatggagtcactcctttagccaaggcattttcaccaagactagcggttgacatacctgaattggacaaaaggaagaagacagttgcagtagcaaggaaagctcccactacttgcgctgcgatatagttgaccaagtctttagaagacaagcgtttgttgacaaacatagcaacggaaacagctgggttcaagtgggcaccagaaacagtcccaatggagtacgcagctgcaacaatagacaaaccaaaagctaaggcaattcctaaatgaccgagaccttcagtcccatttccaaaaacaactgctccagtcccgataaagacaagcataaatgtgccgatgacttcagcaataaactttttcataatcaagtttcctttcttaaaactgttgtctagtttatcaaaaatcgactcttgcctcaagaaatatgcctagtcattttctgtcagacaaaaaagccatccgaagatgacttttcatacttaaatcgcgtttttatctttacctagagatcgttgaacagctttgacaatctcaacaaggaccacaatcatcattgcacctacagcaaccaccaaccattgcgtcaaactcaaatttgaaacatggaagagtttgttaaatcctggaaccatgatggttgccattaagagaataaaggcaactggaatagaccagttaaaggtcttgttcttgaagagtcccactttaaagattgattggtaaacggatttaacgttaaaggcatggagcaattggatcaaaccgagagtcgcaaaggccatagtaagggcatctgtatgcatctctgcatgaccttggtgctctgggaagagaatggcccaaccgtaaacaccaagtaccaagatagtttggaagatcccttgatagaggatagctccgaagactccgccatcaaagaagttagatttacgtccacgaggtttgtgggtcatgacacctggttcagctggttccaccccaagagcgatagctggtagggtatctgttaccaagttaatccagagaaggtgtactggttgcaacacatcccaaccaaagagggttgcaaagaagatggtgaatacttcagccatattggcagacaagaggtattggatagatttttggatatttgagaagaccttacgtccttcttctaccgctacgataatagttgcaaagttatcatcggcaaggaccatatccgatgctcccttagaaacctctgtaccagtgatacccataccgataccgatatcagctgtcttaagtgatggcgcgtcattaaccccatcaccagtcatggcaacaaccttgccttctttttgccatgctttcacgatccgaaccttatgttcaggtgatacacgagcgtaaacagagtattgcttgaagactttttggaattcttcatcagaaagttcattcaactcagcaccagtgaagacatgatcttctgtatcatttggatcgatgattcccaaacgtttggcaatagcttcagctgtatcttggtggtcacccgtaatcatgatcggacggatacctgcttctttagcgacacgtacagcttctgcagcttctggacgctcagggtcaatcatgccgaccaaaccagagaagatgaggtcagattcaacaatttcagattccaaggttgggatttcattacttgtcttataagccatcatcaagacacgaagggcttgtttggccaagtctttattggtagcaaggatagcttgtttatcttcctcagtgattgggcgaacttctccattaacttcaatacgagtcacacgtttgagcaattggtcaggggcacccttaacagcgataaagtaagatccgtctgcttccttatggatggtagacatgagcttacgatcagagtcaaatggcaattcagccacacgaggctcatccttcaagacttcacggacatcaaagttgtggtccaaaccaaactgtacaagagctgtctccgttggatccccaatcagcttgccagatgggtccaccttagtgtcattggcaaagttcatgatacgtagcgtattgttgttagcagcaatttcagatgccgagctttgcaattgaccgttggtataaactttttcaaccgtcatttggttcatggtcaaagtacctgttttatcagatgcaatgatttctgttgaaccaagcgtttcaaccgctggcaatttacggacaatcgaattacgttttgcaagggttgtagttcccaaagatagaacgatggttacaatggcagggagaccttctggaatagctgcaaccgcaagggcaaccgccaccatcaagccttctaatgggtgttcgccacgaacaaagacaccaaccaagaaggtaatcactgcaatcacaatgattaagtaagtcaaggccttagataattgttccaagctttgcttcaacggtgtctctgtctcgtcggcattagccaacatatctgcaatcttaccaacttctgtgtacataccagtgtttgtcacgacaccaataccacgaccgtaagttacgtttgagttttggtaacccatattaactcggtccccaataccagcatctgcttctaccatttgagtaatatccttttcaaccggtacagactcaccagtaagagcagcttcttcgattttaagagacgccgcttcaagcaaacgcatatcggcaggcaccacatctccagcttcaagcaagacgatgtccccaggcaccaattcttttgagtcaatctcaataacatgaccatcacgacgaacacgagccatcgggctagacatatttttcagagcttcaatggctgcttctgcttgcccttcttggtaaaccccaaaggcagcattcaagactacaacagccaagatgataatggcatccgttagaccgtccattccttctgtaatcacagaaagtgccgctgccgcaagcaagatgataatcatcaaatccttaaattgatcaaggaatttagctagtaggccacgtttctctccctcttccaactcattacgaccataagtcgctaagcgttcttgagcttgagcagttgacaagccttcaattgaagagtccaattcctttagaacttcttctttactctgtgtataaaacaaagctttattttgttcttttgacaaaataatttcctccttatagctttctactaggtctcttttgcacaaaaaagagacctgtttgaaaaaacaagtctcgccgtttaatatagtgccggaaataatttcgtaatgacgacactatcgcggaaaaccgccagctactcccttgagtggttttattataccatttttatagaataaagcaagcgggatctctaataatttaatgaggattattcttcccattccaccagtaattgataatcggcaaattcctgttctccatcgagagttaacaagcgataagagacttgcaaatgacctgcttctaattgaaagaggtctgttgtaatcaaaaactgctgaatgcccatcggagttgggatgattgccccaccatattcatttttgtagaaacgcatgatggatttaggacttgagaatcgtgtcatgaccaattcatcattggaaaatttcaaagcaaccttttcatcttcttcattggtatacaagagatattgaaaacctgctttttccttccattcaccttgatagtactgatcaacaatttccatttcttctccaaatcgaatggtattttgaatgcgaatctgcatctttgtctccttctcttcttttcttgccttactattctatcaaattttacgcattttgactgcccctattagcctctagatcgcaaaataggcttttttttgctataatagacccatgaatgaaaaagtctttcgcgatcccgttcatgattacgttcatgtggatcatcccatcatttatcaattaattaatagtaaagaatttcaacgactacgccgcatcaaacaactggggacatctggttttaccttccacggtggggagcatagtcgtttttctcactgtcttggcgcctatgaaatttcaagacgtattctgtctatttttgaggaaaagtatgcagagcaatggaattctgatgaaaacttactgaccatgacagccgctcttcttcatgacattggacatggtgcctattctcataccttcgaaggactctttggaaccgatcatgaaaagatgacccagctgatcatcaccagtccagagacggaggtcaatcaaatcctcttacaggtagcacctgatttcccaaaccgtgtagccagcgtcattgatcatacctatcccaataaacaagtggtgcaattgatttctagtcaaattgatgtggaccggatggattatttactgcgggatgcctattttacgggtgcttcctatggaaaatttgacttgacccgtattttgcgtgtcattcgaccgattgaaaatggtattgccttccaacaaaatggcatgcacgctgtcgaggattacgtggtcagccgttaccaaatgtatatgcaggtctacttccacccggctactcgtgccatggaagtcctccttcaaaatctactcaaacgcgctagaaccatttatccagatcagaaagagtattttcaactgacttcacctcgcttgattccattttttgaagaagaggtcaccattcaagactacctaaatctagatgacggtgtgatgaatacctatttccaagtctggatggatagcccggataccatcctgtctgatcttgctcagcgctatattaatcggaaagtcttcaaatcgattctatttacagaagataagcgaaaagacttagcaatccttgaaaaactgattaaagaggttggctttaatccaacctactacacagctattcatcaaaattttgacctgccttacgatatttatcgaccagagcttgaaaaaccacggacccagatcgagatgatccgaaaagatgggagtctcgctgaattgtctcagttgtctccactcgtcgctgctttagcaggaactcgctatggggacaaccgcttctatttcccaaaagaaatgctggaggttaatggacttttcagtaagcaagtagaggaattcacttcctatatcaccaatgattattttacaggagagacggatgtccattaaattagttgcgatcgatatcgacggtacacttgtcaattcaaaaaaagagatcacaccttctgtatttgaagccattcaagacgctaaagccgcagacgttaaaatcgtgatcacaaccggtcgtcctattgcaggggtctcaaaacttttaaaaggactccatttgatggatcctggagactatgtcattacctttaatggcggtctggtgcaagaaactgctactggaaaagaactcatcaaagaccttttagattatgaggactatctcgatatcgagtctcttgctaacaaactccaaatccactctcatgctattactaaagacggcatctataccagcaatcgcgatatcggacgctacaccattcatgaatctcaactggtcaatatgcccctttattaccggacgcctgaagaagttcgtgagaaagaatttgtcaaggccatgtatatcgatgaaccagacattctggatgatgcgattgcaaaaatccctaaagaatttaaggatcgcttcaccatggtcaaatcagctcctttttatttagaaattctagggaaaacaaccaataagggatcagcccttcttcatttagctgaacgacttggaatccagcaagaagaaaccatggccatcggagatgaggaaaatgaccgttccatgctagaagtcgtggaacatgccgtcgttatggagaatggcaatccagctcttaaaaaaattgctacacatattaccaaatcaaatgatgaatctggcgttgcatacgccattagaaagtgggtattataagaaatgtaccattaccagctaggaatttctgctagtgagcatgatgactttgttattcagagtgaccaaaccaatctcttacaaagcagctcatgggcaaaaatcaaagataattggggaaatgaacgggttggtttttatcaagaagaccaattagtcgctgttgcaagcatcttgattcaacccctgccacttggcttttccatgctttacattcctcgaggcccaatcatggattaccaaaacaaagagctggtttcatatgtgatccagtcccttaaaaaaattgccaaacaatacaaggccttgtttgtgaaatttgatccaagtcttttcttgagtaaacacttgattggacaagaaaagacggaagctcctgctgtgcaagcgatgatcgacaccttaactaaagaaggggttgaatggactggccgaaccagtgatatggcagaaaatatccaaccacgctttcaagcaaatattcacaaagagtttttcactgagcaagatctttcaaaatctactcgacaagccatccgaactgctctaaacaaagggatccaagtccaatttggcgggactgaattgttggaggactttgcttctctcatgaaaaagactgaggctcgtaaaagcattcatttacgtggaaaagactactacgaaaaactgctcacaacctaccaaggacaatcctacattactttgtctacgctagatctcgagaaacggaaaagctcccttacaaaaaatcttgaaaaaaataaggcagaggctgaaaaattcacagaaaaaacaaagcctggcaaggttgagaataaccaaaaagaaaaagagcggatagaggaagaactgcaatttcttgaacagcatctccaagcaggtatacaggttgttcctttatctgggaccttaacccttgaattcggtgggacatctgaaaatgtttatgcagggatggatgaagaattccgccgttaccaacctgctatcctcacctggtatgaaactgcccaacacgctttcgaccgtggtgcttcttggcaaaatatgggggggattgaaaattcactcgatggtggtctctatcatttcaaatcaaaatttaatcctgtcattgaagaatttgttggggaattcaacctcccaaccagtccactttatccacttgtaaacaaagtctacaagatccggaaaaaattaaggagtaaataaagttacatgactcttacgacaatttcaaaagaagaatttacctcatttgcaaatactgtttcccatcgctcttttatccagtctgctgaaatggcagatctgcttgaaaagcgaggaaacacggtccaatttatcgcttggaaacaaaaaaatcaagtccaagtggcagcaatcttgtacagtcttcctatgacaggtggtctccatatggaaatcaattctggccccctttaccaagaggaagctatgctagaacccttctatgcagccttaaaaaactatgcgaaagaaaatggggctattgaactagttatcaagccttatgatacctatcaaacctttgatagtgacggcaatccaaccagtgaagagcaaactcattttatggatacccttaaaaacttgggctatcagcatgatggtttaacaacaggttatccaggaggagaaggtgattggcattatgtgaaagatatggagggcatcaccgaaaaaaatcttctcaagagcttcagtaaaaaaggaaagccacttgtcaaaaaagccaaatctttcggtattgaactgaaacgattaaaccgggatgaactgcaactctttaaggatattacttcctctaccagtgaccgtcgcgactatcaagataagaccttagattattaccaaaccttctatgatagttttggtgacaaagcggatttcatgatcgcaacactgaacttccaccactactacacgaatcttgaaaaagaccaagcgaaactagcacagaagattgagaaattacagaaggatctagaagtcaaccccaattcagagaaaaaacaaaatcaacttcgtgaattctctagccagtttgatacctttgaagtgagaaagaaggaagcaaaagaatatattgaaaaatatggagatcaagacgtcattcttgcaggtagcctcttcgtttatatgccgcaagaatccacctatttattcagtggctcttatacagaatttaataaattctatgctcctgctgttctccaggaatatatgatacttgaaaccatcaaacgtgggataccaagatacaacttccttggcattcaagggatctttgatgggtcagatggtgtgcttcgtttcaaacagaacttcaatggctacatcgttcgtaagatgggaaccttccgttattatccccgtcctcttaaatacaaaatgatttctctcattaagaaacttttaggacgttcctaactcaaaagaccagctttgtagctggtcttttctactataaaaaagtcgaggggaacctcgacttttatagattattatttaacaaagtcaagcaatgccaagaagctttcagcttcaagtgatgcaccacctacaagagctccgtcaacgtctggacaagccatgtattcagcaacattttcaggtttaaccgaaccaccgtattgaacacgtactttgtcagctacttcttgaccaaagtcagcagctacaacgtcacgaacaactttacacattttttgtgcgtcgtcttgtgaagctgatttaccagtaccgatagcccagattggttcgtaggcgattactgttgaagcgacttgttctgcagtcaatccagccaaagcagctgaaacttgagcacctacgaattctgctgctttaccagcttcgtaagtttcaaggctttcaccacaacagatgattggaagcataccgttcgcaaagattgcttttgcttttttgttgatgtcttcatcagtttcgtggaagtagtcacgacgttctgagtgaccgatgactacgtagtcagtaccgatttctttcaaaacttgtgggctagtttcaccagtgaaggcaccagcattttcaaagtaagtgttttgtgcagcaactttaaggtttgaacctttagcagcagcaagtacagctgtcaagtcaactgcaggagccgcgatgccagcttcaacaagatcagctgaaggaagttttgatactacagcttcaacgaatgcttttgcttcttctggatttttgttcattttccagttaccagcgataaatggtttacgtgacatttcacatacctcttttttctatttttatactatctattttaccataaatttcttcataatgaaaggttgcacaagctcattttactttttgcaaaaaataaaaaccccgtcttcacggggttttttgtctgtctatataattgttaatctgggaactagatcgaattaagcttcgatttcagtaaccatacctgaaccaacagtacgtccaccttcacggattgagaatgtagtaccttgttcaacggcgattgggtggatcaactcaacgtcgatagtcacgttatcaccaggcattaccatttcagttcctgctggaagttcgatagatccagttacgtcagttgtacggaagtagaactgtggacggtagttgttgaagaatggagtatgacgtccaccttcttctttagtaaggatgtaaacttcacctttgaatttagtgtgtgggttgattgaacctggtttagcgataacttgtccacgttcgatttcatcacgttggataccacgaagaagcacaccaacgttatcccctgcaagaccttcgtcaagttgtttacggaacatttcaacaccagtaacaactgctttttggatttcttctttgataccaacgatttcgatttcgtcgttgacacgaacaacaccacggtcgatacgacctgaagcaactgtaccacgtccagtgattgagaatacgtcttcgactggaagaagcaatggtttgtcagtatcgcgttctggttctgggatgtactcatcaacagtatccatcaattccatgatgatgtcttcatatttagagtcaccttcaagagctttaagagctgaaccttggataactggaaggtcatcacctgggaaatcgtattctgaaagaaggtcacggatttccatttcaaccaattcaagcaattcttcatcgtcaaccaagtcaactttgttcatgaagacgatcaagtgtttaacaccaacctgacgtgaaagaaggatgtgttcacgtgtttgtggcattggtccatcagttgaagctactacaaggatagctccgtccatttgagcggcaccagtgatcatgtttttaacatagtccgcgtgtcctggagcgtcgatgtgagcgtagtgacgtttagcagtttcgtactcaacgtgtgcagtgttgatagtgataccgcgttcgcgttcttctggagcagcatcgatagacgcatagtcttttggttggttaactgatgaaggcaagcgacgtgccaaaacagttgtgattgctgcagttagggtagttttaccgtggtcaacgtgtccgattgtaccgatgttaacgtgcggtttactacgatcgtatttttcttttgccatttgagtaaaagcctccaataaaatatattttatagatagacagtaggcaatacagtctaactttccttactattctatcgaattttagataaaattgcaagccttttacctatattttcttaattattcctcttctttccttttgttttgtcctcttgctgaaagatcctgatcaagctttgaaaatcctcatttgaaatcttcaatttaaactcgttaaacatcttctatcacttcgtttcagagtagaaaaaaatcggaacaatgttccgatttttttaacctgaatttcgtaatcctgtagccactccattgattgtgatatggattagcttgtcttgatcggctgatagttgtccagtccgttgacgtcgaatcaattctaactgaatatagttcaagacgttaaagtacggcatccggtaatccaaactttctttcagataagggttttccgcgagcaattcgtcatgctcctcaatcattaggatgatatccttggtcaattgccattcatgtaagataatctgatagatattgcggacttcttcttcctcacacaattgggcatactcaaaagcaatatccatgttggctttggataagaccatgtccacatttgacaagagagattggaagaaaggccagttcttatacatatatcgaagggtttcaatattctcaggatcctcatcgataaattccttaaagctagaacctactccataccaaccagggaacatcacccgactttgtgaccaagagaatacccaaggaatggcacgcaaaccaccaatttctgtaatagtcttacgggcagctggacgcgaaccaatattaaagctagaaatagctttgatcggacttgattcaaagaagtaatcatagaagtgctcatttccaaagaccaaatcacgatagatatcgtaactgcgattcacgactttatccatgacttccccgaaacgatcaaacatagaaaatggactcttttgttctgcaatcatccggttaatggttgctgaaacgagcatctcaaggttgtagtaggcggcatctttgttcccgtatttattgccaatcacttccccttgttcggttaagcggatacggtcattaatggatttcaatggttgagatgtgatggcttcataagtaggacctccaccacgaccaaccgtaccaccacgaccatggaagaaggtaatcttcactccaaactcatctccgatagcagtcaattgttgttgggctttaaagagggtccaacaagaagacaagtatccaccatctttgttggaatccgagtaacctaacataatctcttggtagttgttcttagaagcaatccaacgtttggcaatcggaagagacaagtaacttctcatggtttcttctgaatgatccaaatcttcgatcgtttcaaacaacggtacgatttgaacgcgagctttttccgtatcgactaagcccacttctttcaacatcacagccaattctaacatatctgacacacttgttgcatgagaaatgatgttttgacgaatgacttcttctcctaaacgatccttcaattcacgggccgtttggaaaatcgctaattctttttcaagcagttcagatttttcagcatgggttgctgataaaatacgtgggtcttctaaaagttctttcaagagaacttgacacttttcatcctctgataaatcagaataatggtcattaattccagctgatttcagcaattctgccacacaggcttcatgcacactcgaatcctgacgcatatcaatagaggccagatagaatccaaaaacatcgatggcttctagaagttctgcaaattcaccagaaatcaaatattctgatttgttttctaacaaggaatctttgatcttttcaaggtcttctttaaattcttgagcagatgcataagctggagcttctttctcagaaattttctttaaagctccagagatacgattgccgatataatcagaaactggcccttgttgatgagcatttgctcctaataacctctcgacagcataacgatcttctctggtttctcccaccatcgtccattcttttaaattgaccaaggtttggatcaattttgattggatatagtggaaagctcgacggtacggttctttttcacgaaagacggatgtatcacttgatagggctgccatttcagctactgcttcacttgttttagaaagactcgttgaaagggagaaatgacggtataattttgaaatcttttcgatgtaatagttcaaaatgacttcactttgaatagttgctgaacgcttcaaggtctcagctgttacaaatggattcccgtcccggtctcccccaatccacatgcccattgtgatcggacgtggttgttcaagctctaatccatgctcttttgccaagcgtttgtattccaacatcagatttggaacagcttgtaagaaagagctattgtaatattccatgacattggtgatttcattagtaaccttcaattttttgtcacgaatcatatccgtttgcatcatgatttcgatattacaacggaggttgttataccacttattctcattcattaaaccagctttaacatcccgatgctgacgaagaagagcatgaatatgattggttagatccagcatggtttttctttgcacttgagttggatgggctgttaaaacaggtacaatattgagattttcaagaatttcctgtgcatcttcattttttgcaacttctttaatggttgaagaaagttttccgaggtattcaccatccacgttattcaaatgattgatttcataggccaaatcgacatcttctgagatgttaatcaagagtggtaaaatagcaaaataacgtgaaatcactgtcatttcttcatttgtcaattgttccactagttgattcaactcacgatagttctgtgtttttgatagatccttcaactgcctaattttatcaaaggtttccggacgaaccaaatttttcgtaatatcatctaataaattggttaagatttcggcttcttctttgataatatctttatttgtgaaattctctaatttttgtaagaccattttttctcctttttgaatagccattcaacaattcccttttaataataaggtttgattttacctttttcttcaaaaaccatgccttcttgttccatcttggcccgtttttcactagcgtcgatattcaaaacgaaagcaatcgctacggataagacccataagctatttcccccttgggataagaaggggaaggtcactcctgtagacggaatcaaaccagaaattcctccgatgttaatgaaggtttgcactaagatcatcccaccgatcccaatggccatcatcgaattaaaaggattctttgctcgaataccgactaaaatgatccgaagaattaagaagaataagagagcaaggatcaaactagctccaacaaaacctaattcttcaatcacaatcgcaaacacaaagtctgtgtgcgcttctggtaagtaaccttgtttttcaatggaatttcctagccccaagccaaaccaaccaccgttactcatggcatagtaggaattagctaattggtgacctgcgccagacaaatcattaaaggggttaaagaaggcactaaagcgtttggctacataaccaaagactggaattttagcgacacggtccacaccgataatccaaattgaaccaaggacaatggacgatactccaacaactaaaccaagtaaagaggtaaaccaacggtagcccactccactagccgtaatcatgatcaagaccgttaaggccaagatcgtcgcatttcccaagtccggcataatcacaacgattccaatcagaatcaaggtcagccaacgccaatcgtttaaattccttggaatccattcattgtgggtcaaggcttgataatcataatcgcgtatctcgtcttgtcgtttagaaaagatcaaggctagataccagactaagatcaccttgaggtattctgccggctggatactaaaccctccaggaatcgtcaaccaaccgtgagctccattgacggtatctgtgataaacctagacagaatcaacaaaatcacttcaataaaaatgacaaaagccagcacttttttatttcgaaggaagtttaggctaaatttataaatcaaggcgatggttaggagacttaggataaaaaagagcccctgtgtccggaccatccgaatcgaactcactccactttgaattgccaaggcacttgttgtcgaatagacaacaatcaagccaatgatggataaaatcaaatagggaatgaggatggaataatttaaaagatgtcttttttcaattttcataattcaccatattcctaatattcaaccttcattatatcatttttaagaagcaaaaccaaggaaaggccagaaaagattcggcttcttccccattttcaagaaatattctaatcattcttcttattttcatatatttttatcctttttcgatgaaaagattccttttttttttgaaaataatggctgaaatcagcatcttttaagcattaagttttgccttttcgttttttttacggtaaaatgtttctgtatgagaaaaaggataaaacccgttgttctcttggtcttttttatcggtatcatttcttttctcgttctctcacgaacgattgccgatctacaagccagagagcgacaagaaacaaccaaaaccattccgaactccaatacacctcgaaaaacaactactgcaagctcttcttctaaaaaagaagaagacatcaatccagaactggttggccgcccgatcattgatatctcaggctggcaattgcccagtgaaattgattacgatgtcctctcccaaaatgtgggaggtgtgatcgttcgtgtccatagtggggctcaagctaaaaaggaaaatgcagcaacctacttaaatggtctggataaatcttttaaaacccatatccaagaattccaaaaacgaaatatccctgtcgcagtctatgcttatgtcgctgctaaggataaaaaagaaatggaaaaagaagcagaagaattttacaaggctgcttctccttacaaaccgacctactattggttagacgttgaggaaaaaaccatgaaagatatgaatgcaggcgttgaagctttccgagcaaaactacaagctttgggtgcaaaaaatattggactctatatcggaacttacttcatggaagaacacagtatctccactgataaatttacggctctttggattcctacttatggatttgatgatggctactataatgctgcaccagataccaacacggaatacgacttgcatcaatatacctctcaagggcaattaaatggattctcacactacttggatctcaaccaaattgctccgacgcaagaccaagaagcgatttatcggaaacttttcaaggtacaaaaagataactcttcctcatagccttaaaacagcagatcaagtgatcttcactttttctgctgttttctatttttcaggagaaggcaatattgccgctattatatgttataatggtctaatgaaatctgattttgtagagaaaaagagaaaaggagaaagccatggcaaaaaaaaataaagtgaaaaaaaccttggtcgagcagatcttaacaaaagcaaaaattgagcacataggcttacaaatcaacgcccttgaaggaatcattccagatgggattacgaccgatcaaatctttaagacactggctctaacaggcgataaaactggtcctgtcatcgggattgttcccatctctgcccacttgtcagaaaaaaaattggccaaactctctggcaataaaaaagttagtatgattccgcaaaaagacttagaaaagacgacgggctatgtccacggagccaataatcctgttggcattcgacaaaaacacaactaccctatttttattgaccagtcggcccttgatctagatcagatgattgtctctgcaggtgaagttggtcacagtattcaaatcaaggcgcaagatttagctgattttgtcaaggctagcttcgaagacttagtcgagtaaaggataaaaccaatatgaaattatattttgtccgtcacggacgtactgagtggaatgaggagggacgtatccaaggggcaaatggtgactctccgcttttagaatcttccgtccagcagttaaaagccttgggccagcatttatctcaaacatactttgatgcagcttattcaagtgacttgcctagagccgtccatactgctcaaatcattctcgagcaaaatcaacatcctatctccctccaaaagactcctgctctacgggaatggcggcttggtaggttagaaggtagaaaaattgtggagttgaaggctctctatccggaggaaatgaaggcctttcgtcataatttagctaagtttcaccacgatattttcggagcagaatccgttgaagaaaccacccaacggaccggaaattttatcaaaagtttaaaagaccagtctggcgaggccattctaatcgttggccatggggctaatttaaccgcttctattcggagcctacttggctataagccagaggaactccgtaaaaacggtggcctcaacaatgctagtgtgaccattttgacaacagatgattttgagcacttttacttagaaacttggaatgatacctcttatttagagactaaaaaacactgattgcaagataattgttttagaatagaggcaaagttcacttagaaactttccttaggtgaatgcggacgtcagcgaacttcgaagaagttccatgacttagttttggacctaaggctccaaaactcccgagttcctgaaacaatttagtttcaggaacttttctcactgcggaaagtttttaatcttcttaaataacaaaaaaatagtagatattttttgaaaatcatctagttgtcttatgtaaaacaatagtctgtatacattcaaaaacactgatcttgtgatcagtgttttcttttagcttatttcatagttgggaagagtaggacgtcgcgaattgttgttacattggtcaacaacataacgagacggtcaataccaattccaagtccacctgttggtggcataccatattcaagggcttcaacatagtcatagtcgatgcctgtagcctcgtcatctcccaattctttggcacgcgcttgcgcttcaaaccgttgcaattgatcgattggatcattcaattccgtgaaggcattggcatactctttggtcatgataaagagttcgaaacggtcagtgaagcgtggatcttctggatttttcttagccaatggagatactgctactgggtgaccgtaaacaaaagttggttgtgtcaaggtttcttcaacgaattcttcgaagaaggcattgataatttgtcccacttctgtgtagtgtttttcaactggtacatgtttttcgtttgccagtgctacagcttcttcaaaggtcatgtctttccagaagtcaacacctgtgatttctttgatcgcatcaaccatgtgaacccgtttgaatggttcgttgattttgatttctgttccttgatagtcaattggaccatcaccatggaccgctttcgcagcatgttggataatgccttctgttaagtccatgatatcgtggaagtcagcgtaagcttggtagacttcgatcgaagtgaattcagggttgtgagtagcatccattccctcgttacggaagatccgtccaatttcatagacgcgttccatcccacctacaatcaaacgtttcaagtgaagctcagtcgcgatacgaagcaccatgtcaatattttgcgcattgtggtgagtgataaatggtttggcagccgcaccaccagcttcattgtgaagcactggtgtttccacttcaaggaatccttgaccatctaaataacgacgaatttcagagataatttttgaacgggttacaaaacgttcgaagctttcacggtttgaaatcaaatccaaataacgtttgcgatagatggtttcaacgtctgaaagtccgtggaatttttcaggcaaaggacgaagggcttttgacaagtgagtgatatgagttgctttaatcgaaagttcacccatgtctgtgcgcatgatttccccttcaacaccaaggaaatcaccaaggtctgcttttttgaagatctcgtagttttcttctccaactgcatccttacgaacgtagatctgaatttgaccttcacggtcttgaagatgggcaaagccaacctttccttttccacgttttgttacaagacgaccggcaataatagctgtttcgttcaagtcgtggagttgttctttatctaattctgaatatttttcttttaattgacctgaatttgcagtacgttcgaatcgctttccaaatggatcgattccttgttcacgaagggccgccattttctcacgacggacaatctgctggtcattcaattcttccatatgttcagtagtcatttggaacctcctaagttattcttccctattctatcatatttaggccagaaattcactaatatttaccaattaaacaaaaataaggtagaagaaaaaatgcagcttcctgaatgaatactcaaaaacatttgaacaccgtccttgactgctcaatccgtttaacctgtataaggcaatatgattgaaacgggttcgacaagagtacaaaaaaggagcgtggtgaatcttaaaccattcatcctgactcgctcctatttttattcataacgcagtgcttcgatcgggtttaacttagaagccttatttgctggtaaaatcccaaagataatgccaacaaatgcagagaaaataatactaccgatagcaacatttaaggaaataatcggcggtccttctaaggaggatgcagcgagtgtagtaatcaagctattcacaccatatgcaaggccaagtccaattagcccaccaatgatggtcaagaccatcgattcaatcaaaaattggaccaaaatcttacttctcgttgctcccaaggccttgcgaagaccaatttctctcgtccgctcggtaacagaaaccaacatgatattcatgactccaatgccaccaactaagagggaaatcccagcaatagctccaatgactgatgtcataattcctactactttattggtttcctcaagtatgctatccaaattaaagatttgaaattctccttggcgaacacctgaaagttctgttaacttttgagcagcctcgatcccaacggttttaatctgcttcacatccggcacatggacgacaatattttgaatttcatccgttccgaattcagaggcgagttgtgtattagccatcaaggcactgccacctgaggaagctccgtaaagagctgttcctgcatttggatccttgaaaataccaacgacacgataattgttgtccccaacagagactacttgattcagtggattctccgttccaaataattgttgggctaagccttcatccagaagcactacccgggagaaattactatagtctgaaggggttaattttcgtccagataagagctcaacctttttgacagaaaaataggtctcatttaccccttggatgttcactccgtctgcttttttcttttgaaaagcaatggttgcattggaggtattgctaacatagtaactatcgatgccttgaatcttggttaattccttaacccaagattcttgcacaactggtggtgcttcttggacttgaccatcaacatcttcagcgttttccccatcgatatccgacggagcagccatccctcggtcttcagctgcagggccactttcgcctccgccttctcctgtatcttcagaagggccaatattgatcccagtcacatagccactcttgttgggagaataagagatttgtacatactcttggtccttggtgaaggtcttggtgacaccagctttcataccatctcccagagccatgatgacaacgacagaagcaaccccaataatgatccccaccatggtcaagaaagaccgtaatttatggctcataattgagctgatcgcaaatttccaattttgcattaggtccccctttccagcttgctatctgaggagatcagtccatcacgaatgacaatgcgacgatgcgcaaaggctgcaatttctggctcgtgtgtaaccatgataatggtttttccttcttggtttagcttggttaacaagtccattatttgctcccctgtcttggtatctagggctccagtcggctcatctgctaagacaatggctggctgattgacgagagctcgagcgatcgcaacccgctgtttttgaccccctgagagctctgaaggcaaatggtgcatgcgagaatggagctctaccttttcaaggtactgctcagctaattctttccgtttagcaggatgaactcctgcataaatgagaggcagttccacattttgaaaggcattgagcttagagagaagaaagaattgttgaaagacaaaaccgatctgttcatttcgaacacgtgctaattttttctcactgagatttccaacctcctgaccttctaggaaatactctccgctggtcgggcggtccaacaagccaatgacgttcatcaaggtcgatttccctgagccagatggacccataatggccacaaattctccctcttcgacttctaaatcgatgtcttttaagacacgaagttcctggtccccgtttttataggttttattgattccttttagttcaatcaattttgtcatattttccgatctcttttccatcttccagtttctcattaggattcacaataacttgagcatctttcttcaagcctgacaagatttcctggttttcagcatcggcgttaccaagcgtcacttttactttcttagccttgccattttcgaccgtccatacatagctcgtatccccatcagccatgacacttgtcacgggaacaaggggatgttgagtagaacttttgacttcaatattgacagaaaagccttgtttgagttctccaatctcactggtaatatccactgtaaatgggtacttggctccaccgcttccttgtgttccacctgctgcattggcacctgcttgacccgcgtcggtcggatagttggctacataagaaatcttgcctgtccaggttttatccggataaaccttggaagtgaggaccacttcctgaccttcagagatattggccaaattgtattcagacaactcccctttgacttgtaaattcccgttgctcacaatgtgaaccagagtttggttggtccctgtagtcgattttgaaacatctttattgacttcgaccacggtaccatctgtattactcctaactgttgtcgcatccagaagagccttagccttgttcatattatcgaccgcatccgacttggcatctcgtaaatcgctagcttgagaatcaactgttcgttgggtctgagaagctgatttggcatctgcttcttgatcacctgtcgtatcaatggtcacaccatttgtcagtaagtcatttaactgacgatctgccttattgacagcacgaacggctgcatcataagctgtttgggcctctgtactgctatactgaacaattggctgaccggccgtcacttgatctcctacattgaccaaaatcgattgcaaatccccttttgttccatcaaaatagacatactgttcctggttggcagtgactttcccagttaacaagactgaagaagcgatcgatccatccttgaccgtttgcaccattggagtttctttcgtgattgcttgatcaggtgtatttgggtgcgaaaacatcatcacacttcctgttccaatcaccacaattgctgcacctgcagctgtaaatagttgccattttttcaatttcttcatcgtttttctccatcaaagaaagcgttttattctataccatagtataccatatttccttacttttctatctaaaattgacacggcaaaatgaaatttaaatgcttggtaacatgctaaacccttgacttttgtaacagttgatattacaatcaaactgaaatcccatttaggaggaaaacatgaaagaatttgatattatttcaattggtggaggtagtggaggaatcgctaccatgaaccgggctggggagcacggagcgcgcgctgctgtcattgaagaaaaacaattgggtggcacctgtgtcaacagaggatgtgtgcctaaaaagattatgtggtatggtgcacaaattgcagaagctattcgcgcttatggaccagactatggatttacttctgaacaaacaagatttgattttgcaaccttaagaaaaaatcgcgaagcctatattgatcgttcccgtaattcctatgatggcagtttcaagcgaaatggagttgaacgaattgaaggacgtgcccgttttgtggatgctcatacggttgaggtaaatggagaaaccattaaggctaagcatatcgtgattgcgaccggtgcccatccttttatcccttctgttcctggagctgaatttggcgaaacttctgatgatgtctttgcttgggaagaactccctacatctgttgccattatcggggctggctacatcgcggtggaactagctggtgtgctccaccatttaggagtccaaacagacctcttcatccgaagagatcgggttttacgtagttttgattcctacattgtcgatggcttaatggaagaaatggaaaaacaaaaccttccgcttcacaaacataaggttcccatgaagcttgaaaaattagaagacggtcgtgtgaagatttattttgaggatatgaccagccacgtggcagatcatgttatctgggcaacagggcgaaaaccaaacgtccaggatctcaatctagaagctacaggcgtcaccttaaatgaaaaaggattcattgcagtggatgaataccagaatacagttattccaggaatctatgctcttggggatgttacaggagaaaaagaattaacccctgtcgctattaaagctggacgcactctttctgaacgactattcaatggaaaagtcaatgccaaaatggattatacaaacatcccgaccgttgtcttttctcaccccgctgtcggaaccgttggcctgacggaggaagaagcccagaaaacttatggaaaagagaatatcaaagtctatacttctcaatttgcttccatgtacactgctgtaacccaacaccgccagcaagcaaaatttaaactcatcactgccggtcccgaagaaaaggtcgttggccttcatggtcttggctacggagtcgatgaaatgatccaaggatttgcagttgctatcaagatgggagcgacaaaagccgatttcgatgcaactgtcgccattcacccaacaggatccgaagaattcgtgacaatgagataaaacataagcttgaagttgttacacttcaagcttatttctttgtttatggtaagatggcaatggcacgaacaggtgaaccagttgccttatcccaatgagggaaagcaatcgaaatcaaggcacctacagctgggacttgatccaattggttcaagacttcaacttggtagatgttttgttccaagaggtagtattcattgaccaagccatgctctgctgctggaatacccgcatcggtatcaaaggtttcatgccccacagccttgacatggcgttcatgaatcaagaattccagagcttcacggctccatcctggactttgttgaaccccattttcatcaaggttgcgcatagcatcttgatccggccaacgttttgaccaatcactacggaaggccacaaaggccccttctgcaatttgtccatgctctgcttcaaagtctaagatatcttgtttgctcaagataaagtttggattggctgcaacttctttagacttgtcgataacatagagtggcaagaggagatctttaagggaaatctcatccaaccaacgaccaccttctacaaagtgaatcggtgcatcaatatgcgttccatattgaccaaccactgtaaatttttgaacatggaagccatcttttagtgtgaagagatcttcttgttgcaaggcaggaagggctgggaagtgtggactttccgcattgatctggtgactcaagtccacccattttttagcttgcaattctttataaatacttagtaaatctgacatgtttcttcctccttattcgccccaaacttcagcgacaatttctttaatcaaatcgatttttttccattggtcttcttctgtcaaaatgtttccttcttctgttgaagcaaatccacactgagtagacaggtaaagattttctaaaggtacatactgactcgcttctttaatacgagcgatgacttcatccttgttctccagttgaccactcttagatgtcaagaggcctaacaccactccttttccaggggtcacttctgcaagtggttcaaaaccaccagcacgatcggtgtcaaactcaaggaagtacgcattgaccgcttcttctccaaggagttctttggcaatcggtgcatagccacctgatgaagcccaggtggaatggaagttcccacgacaaacgtgtgtattgacggtcaaaccagctggaacattttggtagacatcgttgttaaaggtcaagaagagatcagcgagttcccggcgaacctcatcttttgacttgtcttgagctgctccccaagccgtcaaaaaattatcgtctaccaagacaccccacgtacaatcatctacctgaagtgtccgaagtcctgcatcatacaaatcttgaatcacttgaagataggcttgcttgatgtcttcacgaacagccgcaaaatcaggatagatggtattcaattgctctacatgttctgcatcacggatcaattcaaaatagaattgcgcaggtgctggaatggtatatttaggttctacaccatctacatctgctacaagatcacgcaagaacttgtaatgctctacaaatggatgattggctcctgtaatttttccaactacaagtgccgagtccgccttggtcgtttcatcatggaattgatagccttgtgcagcttggacgtgatcaatgccaccaaagccccagaagaaatccaaatgccaataagcacggcggaattctccatccgttactgacttcagaccagcagaaatttctttttcaactaagtcacgaatcgcttgatcttctacttttgttaagtcagcctgactgatttttccagctgcgaaatcttcacgagcttgaaccaaagttgctggacgaagaaatgacccaacatggtctatgcgataaggtgcatgtgtatgtgtcaatatgattccctctttcctataaattttacattaattcattaatgcaaccattatagcagtccaacacctgataaacaagggtttgggataatctaatatctttgacatctatatagtcttagactataacaaaaaaagaagtctttgagggacctcttttttattttaatttttaaatgcatctagcataacttgaaactcttcgttcgtgagtgtaatgcctttccccatctttgtatgatcgggactccaggtccggatatcatacttagctggagcaccgttaaaacttacacggttcaattccttggtccaacccttgtcattttctgacaagaccagtagatgttcttcgatttggaatgaaaattctgccatttcacgactcctttcttgccttctcatctctaatattcgtaaatcatttacaaaatcgttgaaattatctataatatattgtatcaagttatggagaatttagctatgaaaaaatttctcgagatcgttaaagaccgagcaaatgaatttttcaatggaaaagtcagtacccctgccccattagaagatgagagaattattgaaatcattcaacaagcattgcgaaaaaaacaaggggtacatgttattttttcaaacaagagttttacaggcgatattgtcaaatatgaccaagaacgccgacaactgatcgtgaaaaattttaaaaagagtatgtccacgattattcggatttctgagatccagaaaatcagtttggtccccaataatattcgcatcgcccaacaaaaaggagaggtttaaccctctcttttatattgaagacaaacgtcatttttggcgtttgtttttattacttttaatctcatttctaaatttattagagtatcaaaaaaattctatcaaattttaactttaacttttgaacctagtaaaaagttaaagttccagtacatactactagtattgacgttgccttgattaaaaaggtcaccaaatctttcataattacattatctatttaaagaaaaatattagtaataaattatgtaaattcaatctaatctctaagcaccataagtatgctcccattttttcatttcttcaacgatacttcttagagcaatacctttttttgtcattttatattcaaactgtggaggcgatgtcggtaaaacttttcttgataaaataccttcttgctcaaaatcatgcaaccgttgagctaatattctaggattaataccttctacactacgcaaaagactactataatgtatattaccatcaataatttcagataagatctcaagagtaaatttaccttttagtaaattcaagacccttcttgctggacaaattgattttttcaaagattgcttcttgcaagtctccattcatttcctccttttttgatagttactatactttttttcccttcttgtttcagaaattattacatgataagctaattatatcatttgaaaggggaaattactatggatattacaactaagtttgaccgtatcaaagatattctcggttgcgttgatggaagatactttggcactggatatactcaagtaaaatattttcagaaagttaaatatattgcttttgattgataaatgaaaattggtttgatgaaataacggaggaagcttgatgaaaaaaacaaatacaaaagcgccagcttatctactttttattctttcactaggatacattatggcggtcctagatacaaccggagtggttcttgctgttccccatattgaaacagctatgagcgtctcattagagcaatccatttggattattaacgcctatacactagctttaggctctttactcctactttcaggaaatctaacaacaaaatatggtgctaaacgaattttattatttggaatgacaatttttacacttgcctcatttgggtgctctttttcaccaaatattgaaacattaatcatacttagattcgttcaaggtttcggtgcttccttgtttatgcctagttcattagcacttttattcatttcataccctgattctactaaaagagcacgtatgttaggaatttggacagcaattatttctgttgcaaccggtactggttcttttattggtggactaattattaactacttcggatggaggggtattttcttaatcaatattccattgggaattttgacagtaatttcaatattacttcttgtgaaaaacaatattgccaatccaaagactagaattgactttttcagtaatatatttcttgttgcaactatcggaagtctagttatttaccttgttgaagggaatcaatatggctatagtaacctaaatcttttattgtttcttctcctgtttatattatttactattggtttagtagtccacgataaaaaaagtaaagcacctattgttccccaccaactattaaaaaatgctaagtttattgtctctaatctgttaggtttagtagttaacatttcattatatggtattgttttggtgctaggactttattttcaaacttatttaaacttctcctcaatggtttctggactcctcattctaccaggaatgattgtcttaattattggtaatttattttacgcacgtgctgtaaaacgattttccgtgggaagcctcgctactgtctcaattatttttgccattgtaggagcagcaggaatttatggaattggagtcctttttcatgaaattcaactatacatcctaatccctttattttctttaatgagtctaggtatcggagtgttaactccagcgactactaccattcttatggaagctgctggtcaagaattatctggaattgctggtgctactctaaacgctaacaaacagattggtggactttttggtacaacaattatggggattctaactactaatttatcccataattggaatatggttatcgttgtcgcatttttggttaacgtgataatgtatattgctacttggttaattgctagtcgttacctttatggaaaagaataaaaccaaacagaatgcattcaatttaaaagttgattatacagattgaaggaaaagtccatttggacaattttcttcaatcttttttcataattatataaagaaaaaaactcttacaaatgctattatataggcattcaaagagtttttactatatggtaatcaaactctaaaagagaagattttctagtcctaatagagtttgtctatattctgaagagaggtttaaccctctctttttttttgttatactcgaacagttttacttgccccatcttttgagtagagattgattaaaccttcctggcaagaacgaatcatatctcctggcttgacttcttgtgggacggtgatcgtgagaagttccatcggatttggcgcgcgatcaatcttcactccatccttatcatgcaagtcttggatctggcattcaaaatgacggaagcctggtccgtagaattccacttggtcgccttcattgatgacattccgttggcgaatcgtcgctgtcatggtagatggatcaaagtccaccacttctcctacaaatttgtattgaggaatcttacgacgtgccccaaacaattgttcattttcagtcggtgtttggtagtagaatccagttgctaattcacgttgagcgactttccacaattcattgatcaaatcatccttgatggcataaaaggcttctgggctttccatataggcatcacaagctgccttgtaacagttggcaactgttgatacgtaatggacagatttcatccgaccttcgatcttcaagctatcaaccccattatcaatcatgtctggaatattttcgatcatacacatgtccacggctgacatagagtattcttctgggacttgccctttgatactcttgcgttcttggccaaatggcatatcgtagagatcgtatttccaacgacaagattgagaacagccaccacggttggcatcccggtcagacatgtggttagaaagggtacaacgtccggaataggaaatacacatggctccatgaacgaaagcttcgatctcaagatcagtacgcttacggatctctgccaactcttccatggatacctcacgggccaagacgacacgggtcaagccatattctttccagaaatggaaggtctccacgttggttgcagaagcttgtgtagacaagtggatattgaggccaggtgcataggttgcacagatttcaatcaaggccgggtctgagacgatcacggcgtcaagtcccatatcccgcaattcacggaaccattcaccagccccttgttcatttccctcatgggttaccatgtttgaagcaacgtgaacatcaacgccacgtgcatgagcatattcgataccttcacgaagctcatccatggtaaagtttccggcacggctacgcaaaccataggcttgtccaccaacgaaaacagcatctgcgccataattaacggcaacttttaacttttctaatgttccagccggtaccaagacctctggacgtttttttgtatttgtcatgttttctccaatttacaagattgtcgatatgatgaatagcttcttcgttccctgaaaaaggaaaactcacaaacgaagaggcttaatttttttattattttacacgatctggttcataatcgtagaaaccagtatccaaaccacgattagctggatgcaatttgcggatttcttcatcaaacagataggcttgatcctgtgtaaatgttcctttttgaatcaaatcacgggccttgacaaagtactctgtaatcttgacaaagttttcacccggacagtagacaccatcgagtttccaatgatcaaagccatgttcaaccaactcagacaatttggtcatcatattcaagtcattatttgagaagatatgggttccatgtttgtcttcgtagaccgaataatgagaattgggatctcctggctcggccaagaacagatcccgatctttggtcacagactcttctgtcttgataaagttgtaataattctgaagtagcggtcgtttcgaatggtgaataatgctagcaccatagaccaagacttctgctggaatctgaagattctcagccattacgaataattcggcagatggaatctcacgagccaaaacagcctcagaagccccggcttgtttcccccagaaattgatctggcggctagaagtgaccatggttgaggcatcgtaaatcgttttgaatggatagccatctcgtttcaagacataaaaaacgcccgcatctccgacagtaatataatcagcctgaatttcctttagaaaatctaggaaaggcttgattgaatccatcatcgattggtgcatgagtgcatttacagctactgtcaattctttgccagcagcatggacaagttgggcaattcgatttatttcgtcatagcttaaagtttgaggcaatcgtaatccgtaatctttttcaccgacatagattcggtcaacccctgcatcaatcagggcttgcgcttgctcaacactctctgctgttgctgtaataataatatttttcatagaaccattataacaaaaattccgatattctagaaaaatttattcattttgtaaaatttgtaacatttttgtaacatttatatacctgaattcatgatagaataatagagtactgttaggagagagaaaatgcccgtaagaaatttaagacactatgatgaagaattcgattatatcgaattaaccaaacaaacccaacaaacccaagaaacccctattcaggactatgctcctgaagttgaacccgcgcctcaattaagtgaattgctatattttttgaatatcgctgttttctgtgtgttgacggttgtatttagttttatctttttagcaacaaaaatgaataccttctttgcgtttgctttagcgattggttctagctttgctagtattcaaggattccgaatttactacaataaacgaaaaaaataaaaatcaggttttcctgatttttttatttactcgaatttttttaattggaataacaattggaagacaaaacttaactgccaattgccatcttaccttccataaaaaatgaggctcactgagcctcatttttttatacttcttttgtttcttcttcagctgcttcttcagaatctttttcatccaagtctaacacgatgtcttcagattctgtttgtttgcgaatggattgaaccaagtcattgccacttagattttctttttgaagtttatccttaaatgagtgatagacttcttgagatttttcaaccacatcttgcgttttttctttgacagattccaaaacacttcctgtcgtaatttctccagaaccaactttttctttggtttgttggatcacttctgctgcttgttttgaaacatccttagcagtttgtttcaccgattcatgtacttcttgaggatcttcttgataatcttttacgaagcgcaccacttttttagtgactttctttccttgctctgttgataaatagtaggctgctgaagcacctgaaatcacaccaattaataaactagataaacgtcccatattcttcctcgattctatttaaataattttgaagccatcttaatcgcttttaatccgatagaggctttcactgttttttcaccagctgacaccgctttgacactcaattgacgagcttgatcattcaaatctgaaacagactcggaaagatccgccacggctgtaaagagtgggtcaatcgttgcaactttttgattcaaatcatctgttaaaacattgacttttgccaataaatcattggtctggtgcaaggtaacattgacatctgatgtcaaaacttggatggttttttgcgtttcatctacaacttttccaatctttgagaggaaaaaaatcatataaatgacaagcgctactaaggcaaggcctaagaggccgtatgcaatttcaataaacatatattactcctttgtttctacataataaggggcttttttgcgacgttggtagatgataatggcgagtccaactaaaatcaggatcatcgacaaccactgggaaacacgtaagcccgcaaacatcaggctatctgtccgcattccttcgatgatcatccgaccaaaaccataccagataaggtaaaaggctgtgatctcaccttgtcgcaaaaattggggcttcctacgaagaatcaagatcaagagaaatcctaacagattccaactggattcatataagaacgttggctgacggtaactaccatctatatacatttggtctcgaataaaagagggcaggtagttaagacttttaacagcagctccataagcttcctggttaaagaagttcccccaacgtccaatactctgtgcaatcatgacgcttggggccgcaatatctaagaaatcaattggctcaatcaagcgtctacgagagaatagatagaggacaagggcacctgtcaagaggccaccataaatcgcgattcctccgttccagatagcaaaaatctcaccaaggtgctggctataatagccccattcgaaaataacgtaatagagtctggcacccacaatcgcaagaggaaaagcaatcagaatgaaatcaatgatggcatctggatcaattttcttacgaggcgcttctttcatggaaagataaacagctagaatcaaaccagagacaatacaaattgcgtaccaacgaatactgatcggacctaattgaagggctactggattcattccttcacctcattttgactaatcaactgggacaaacgttcttcaaaagttttggtagcatcatagcccatttctttggcccgaacattcatcgctgcagcttcgatcacgaccgaaatgttccgaccagtcttcacagggatgcgaatccgaggaatggtcacgccaccgatttccaactcttctgcattattaccaagacgatcataaacctgatccttagcataattttccaagtaaacggcgatttggacttgtgaagaatccttcacagcactcgcaccgtagagactcatgacatcgataatcccgacaccacggatctctagtaagtgacgtaggatttcagctggctctccccaaagggtcatctcatctctcgcatagatatcgacccggtcatctgctacaaggcggtgaccccgcttgacaagttccaaacctgtctcgctttttccgattccgctatctccttggatcaagacacccatcccataaatatccatcaagacaccgtgtacactcgtacgttctgctagccgactatccaaatagctagaaagctctccagataaacgactcgttgcaacattgctcttcaaaatggctagttgcttctcttccgcagcacgcaacatttcttctggaatttctaaattccgcgcgacaatgatgacaggtgtctctggctggaacatcttgcgcaagacctgatgacggttgtgagagctcatcttcaccaggtaggaccattctttcattcctacaagctgaatccgctcaggtgtgtaatagtcgaaatagcccgtcatttcaagacctggacgtgaaatgtccgcagtcgtaatttccttgcttaagaggctatcatccccataaacaaccgatagacgaagcttttcctgtatatcgcgaacagtaactgccatatcattctcccttttcaaattctctctctattatagcagattttctcttcagacgagagactgaagtgtcatttgaaagatccattttcaactcctttttaaggcaagcaaaaagaggccgagacaaaggtctccaacctctaggaaatgatgggaacatatgaagaatgctctagccttggccttgcaagaaatctttgatcatagatttgattccgatagagaccgcatagaccaccgcatttgaaggaaatgcgatcaagccgtgcataaaggcgaaaggacctccccccaacaaggagaaaaccagatacaaaaccggcagaaataaaatcgaaaaccgataaatttgtggctttctagccatttctgttggcagaaacaagaggtagaagagactattccaaatgcccagtggaaaaaggagcattcccatcaaaactgttccaactccttccccaaaaaaacgatttaaaatgaaaaactgtcctataaaactgaagaagagatatagaataaaagcaagggaatagaacttctgcttcactcggatctccttttagaaaaatggactatcattctgatcatggatgggttcagcctcttttcttcgacgaggtcgagggccatagtcaaacatttcctgctcctcctcgtccttataaggtaaggtcgtatctaacagtaaatagataatcacaccgataaaggcatgagaaaccgtaaaaagaataaacaagaagcgtaggagagttacactaagaccaaatttatcggctaagccagctagcacacctgaaaccaggcgatgtcgttttaatttgtaaaatgatgatgtcatttgattttcctctttctagttagacctattttagcagagtcgaattggaaagagatcagcctaaagaccgattcttacccttgtctcatttcaaggaattgcaggcggctgtgacagcgaccgcaggcatatttcttcagatcgatttttcgctttcgtctatactcttggccacaatggggacattgatagagatagatccgcttgactcgcccagctctatctggaagaggaggtgtgaaacgaagaccgtccacttgctggaggagttgcttaaagtctagatctttgtggcgataccctttaccttgatcgtaaagatggtaatggcagagctcgtggcggacgattttgcgaaagacctctaacccgaaaacttggtatattttagggttgaaatcaaggtgtcgatccttgggaaagaaacgacctccagtagtttgaagacgtgaattccactctgctcgatgacggaattctctcccaaaatcttctagggatacttggcgtacatagtcagtcagattcattcggagctaccaaactgagattgactttttcgcgttccacatcaatcttcttcacccagacggtaaccaaatcacctactgagacgacttggcttggatgcttgataaactgcttgctcatatgggagatatgaatcaagccatcttcgtgaatgccaatatcgacaaaggctccaaagtcaaccacattgcgcacaaccccttctaatttttggccaatatgcaggtctttaatatccaagacatcctggcggagcacaggtgcatcaaaggaatcccgcaaatcgcgacctggttttaggagatcggcaatgatatctttcagggtttctggtcccagatccagctgactagacatctcctcaatgttcacagcttttaatttttcctgagctgatgcatcgagttcggtaatttcaagaagctgaaaaagtttttcaacttccttgtaactttcagggtgaacgccggtattgtccaagatgtttttactttcagggatgcgtaagaatccagcagcttgctcgaaagccttggctccgagacgagggacttttttaatttgcgctcgtgaaagaatcattccttcttcttcccggtatttcacaatattttcagagatggttttattgagtcccgctacatgcgctaagagagagggactagccgtattgatattgaccccaacttggttgacgacagtatctaccacgaaatccaagctttctgtcagttttttctgattgacatcgtgctggtattgaccgacaccgatggatttggcatcgattttcaccaattctgctagcggatcttgcaggcggcgggcaatggagatagccgagcgtttttcaacggttagctctgggaactcatgacgggccaactcactagctgagtagacagaagctccgctttcattaacaataacatagcgaactcctggatggtcatggagaacctctgcgacaaaggcctcactttcacggctggcggttccatttccaatcgcaataatttctactccgaactccttgatcaaggaggacagttcctttttagcctgctcgatctgagctggttttgcaggagcaactggatagatgacctgggtagcgagcatctttcctgtctcatcgacaacggctagtttagcaccggtccgaaaggctgggtcaaatccaaggaccacgcgcccttttaatggaggaatgagcaatagattccgtagattctcagagaacaattgaatggctccgtcttctgccacctccgtcaactctgtccgaatccgacgttcaatcgcaggaacgatttttttcttaaccgcttgttgaataacctcatcgacataggcatttttcgttttaaaacgagcctcaaaaatacgaatgatccgatccagttggtgctcgaatccgactttgagaacgcccaatttttccccacgattgagagctagagtccggtagccttgcatattcttgatcttctcagaaaaatcataatagatttcaaaggttctcttaggatctaagctttcatccttcaaggttgacgtcatgagggaatgcccatgaatttcttgataggtgagggcccgtaattgggtatcctctgaaatagcctctaccagaatatccactgcaccagctaatgctgcggtttcagttgggaaggcctcgcaggtaaatttccgagcctctgcttccaagtctggactattttgcaaaatgagacgtgccaaggggaaaagtcctgcttctcgggcaatcgtcgccttggtccgccgtttttccttataagggagataaagctcttcgacatccgctaatttttcagcagcctcaatagcctgcttgagcgcctctgtcagtttgccttgttcctcaatcttagcaaggacggtttcctttcgttcagctagagccgttaaggatttgtcccggtcaataatggccttgatcgctacttcatctaaatttcccgtcatatcttttcgatagcgggcaatgaagggaatggttgagccttctgcggtcagactcaatacggtatcgatttgttttaagctaacacccaattcttgggctattttttcatatttatccatagcttctattatagcatattttgctgacatcaaggggggagatcgcctgtcctggtctctgtttcagggatttttcatagaataattttgaccctcttgatctttccttttatgctccatttcccccttgctctttcctttttgttataatgaaagaaaataaaaaggaggcccaacaatggctattaaattctcaaaaacagatgatcttgataaaatgtttgaaaattttgcgagttttccggatgtagaaaagaaagtagaatttcctgaagaaaaaaagaagaaggcagaaactgctaccactaaagaagcaaagaaggctaagtaatgacattctttcaacaccttccctctagcgtcttgcaggctggggctatttttctctcgattattatcgaggccctaccttttgtcctaatcggaagtatcatttcagggattattgaagtctatattacccccgagagggtctaccgctttcttcccaaaaataaatttgggcggatcttctttgggacctttatcggctttatctttccttcctgtgaatgtggaattgttcccattatcaatcgctttctagaaaagaaagtcccaagttatactgctgttccctttttggtgacagcaccggtcatcaatcctatcgttctctttgcgacctactcagcctttgggaattctgtcaagatggccctctaccgcgcccttggttcccttttggtcgcaacggtgctagggatctttcttggttttattcagacagattcgatccaaaaagaacatcgtaaggctgtacatgaacatgattttaggggcttgagcaaaggtcaaaagctctttcaagtcttggtacaagccattgatgaattctttgacacgggacgttacctggtatttggttgtctctttgccagcctcgtccaagtctatgtcccaacacggatcctcacttcgatcagtgcgacaccggttattgctattctccttctcatggtcttgtcctttctcctctcactttgtagcgaggcggacgcctttgttggatcctctcttctaacaagttttggagtagcgcctgttcttgcctttctggtgattgggcctatgcttgatgttaaaaatctcctcatgatgaaaaattatctcaagacccgttttatctggcaatttatcgggattgtgagtggagttgtgctcctttatgcttggtttgtgggggtagtgctatgattcgtttcttgatattagctggctattttgagctcaccatgtacctgcaattatctggtaagctcaatcaatacatcaacttacactattcttacttggcttatatttccatgttcttgtcctttgttttagctcttgtgcagctgatcatctgggtcaagcagatgaagatccacagtcatctctctggcttctgggcaaaagtggcgagtattttcttgctctgtattcctttgtttgtcgggctatttttccctacagtgacactggattcccaaacagtttctgctaaaggctaccacttcccggttgcggctggatcttccaaggaaattcagcaggacgaagggacaacaacccagtatctcaaaccagatactagtagctattttaccaagtcagcttatgaatcagaaatgaagcaggctgcaaagaaatatgttgataaaaaagtaatccaggtgaccactgagaattatatggaagtcatggaagttatttatgattatcctgaccaatttgcaggaaagacgatcgagctgaccggctttgtatacaatgaccccaataacaaggatagccaatttctctttcgctttgggatcatccactgtatcgcagattctggcgtctacggtctcttaacgatgggtgctccgcagcatttcgaaaacaatacttggatccacgctaaaggaaccttgtccattgaataccacaagcagctcaagcaaagcttgcctgttctccacattagcgattgccagaccattacgaaaccggccaatccatatgtctaccgcgtattctgatggagcttccgttgtagatccaaacatcttataactgttcaagctagaatccacattgattctagctttttctatgccttcctctcaaatcctctaatccaagcggaaaatattcgtaacaacgattccatcaaagaaatcttgtagattttatggtaaaatatggttaataaaataggaaataggtacttaaatgtcttcaaaagttattgtaaccattttcggagccagtggagatttagctaagcgcaaactctacccatccctttttagactctataaatcaggaaatctatctgaaaactttgcggttatcggaacagcccgcagaccatggagcaaggaatactttgaatcggtcgtggtagaatccattacagatctcgcagatagccctcaacaagctcaagaattcgcaagtcatttctactaccaaagccatgatgtcaatgataccgaacattacatcgccctgcgcgaattgcaaagcagcttggatgaaaaataccaaacggaacacaacaaggttttcttcttgtccatggctcctcaattttttggaaccattgccaaacacctcaaatcagaaggcattgtggatgggcaaggctttgagcgcttgatcgttgaaaaacctttcggtacagacctagaaacggctagtcagctcaacaaggaattggaagaaacctttgatgaagaacaaatcttccggatcgaccattaccttggaaaagaaatgatccaaaatatctttgctattcgttttggaaatcttattttcgataacctttggaaccgagattttattgacaatatccaaattacctttgctgaacgcttgggggttgaagaacgcggtggctactatgatcactctggggcccttcgagatatggtgcaaaaccatacccttcagcttttgtcattgcttgccatggataaaccagctacctttaccaaggatgcgattcgggcagaaaaggttaaagtttttgagcaattgcacaatccaacagacgacgaattgaagaaattctttatccgtggtcaataccattcaggtacgatcgaaggaaaaaaagatatctcttatcgcagtgagcccaatgtcgaccctgaatctactacggagacttatgcttctggtacgttctttgttgatagcgatcgcttccgcggagtgcctttcttcttccgtaccggaaaacgcttgacccaaaaaggaaccatggtcaatgtggtcttcaagcaaaccgattccatctttggacatagtttgcaaccaaatgtcttgaccatttatatccaaccaaatgaaggtttctcattaagcatcaacggaaaagaggtcggagaaaaattcagtatcgcaccgatttcctttgattacgaaacagatgcgaccgcaactggggcttcaccagagccttatgaaaaattaattttcgatgttttgaacaatgactcaaccaattacagccactggcacgaagtccgtgcttcatggcaattgattgaccggattgaaaaactatgggccgaaaatggagcgccgctctatgaatacaagtctggatccatgggaccaaccgcatccgatgatctccttgcagaatacggagcagaatgggtttggaaacctgaacctaagaattaaggaaagccaccttcgggtggtttttttgatagcgcaaggaaacaaaaagacaaattgttcttccaacaatttgtctttttctattcgactcttaaatcaagccttccaagagacctctcatgaagttttctgaatggaatggtccgatatcatcaatcttttctccgaatccaatcaacttcactggaatgtccaactcttcacggatagcaaggacaaccccacctcgagccgttccatcgatcttggtcaatacaattcctgtcacaggcgtaatttttgaaaattctttagcttgcaccaaggcattttgaccggttgatgcatcgagggccagcaaggtttcatgcggtgcatcaggtaccacacgcttgataatgcggccgattttttcaagctctgccatgaggttgtccttgttttgcagacgacctgccgtatcaatcatcagaacatcgatgttttcagcaatcgcacgttccatcccatcaaagacgacactggcaggatctgatttttcaggacctgtcacaacaggaacatctacgcggcgcccccattctgccagttgagccactgctcctgcacggaaagtatctgctgcaaccaacatgactttcttgccttcttgtttgtatcggtgggctaacttcccgatagaggttgttttaccaactccatttaccccgataaagagcataaccgtgaggccatcttgaaaacgaatggcttcattaaattggccatccttttcatacaagtctaccaatttttcgataatcacgcgcttgagagcatctggttttttagcattttccaaacgggcctcatagcgcaactcttcggttaaattagaggcaacttgaaccccaacgtcactcatgatcaagagttcttccaattcttcaaagaattcttcatcgactgaacggaaattcgcaaagaaggcattgaggcgtgctccaaatccagtccgtgtctttttcaagctacgatcatatttttcctgaatggtttcttgctgaggtgcgacctcatcttgaatcggctcctctgcctcttcaacaattctttcctcaacggctgatgcagcttctccttcaggaagtctggactcggcttccgctacttctgaagtttcctccacttgagcgatcgcttctgatgcttccggttctggaaccttcacttctgtcgtgctcacttctactggctcagcgtcaggtgatggtgactcttcttccagttttataacatcaatctcatctgcttcttcaacatgttcagtttcttccgcttctgatttcacttcttcaagaggctcagtctccgtttcatcagctacaggtaaagcttcttcaggagtttcttgtgtttgagcaggttcaaagacaaccggagactcctctactggtgcttggtcctcataagtctctttatcttcaacaagaggctcctctgatgactcttcttgagtgacctgatgagtggctgcaatccgcgctttaagctcttggtagtaagcctccatatcagcgattttttgctcttccttgtcatttgagacagccgtcgtcggctcctctttgacaacttcttcaatctcattactttccgtcacttcttcagaagacggaagcactttttcagcttcttctttctttccaaataatcgatcaaataatcccatttattcactctcctttagcacataattttcaatcgcccatgcgacagcatcttggtcattggtcacgggtgcaacaagtgccgccacctctttcactgccgggaccgcattacccatagcaacccctagtccagcccactggatcatagacaggtcattggcctcatctccacaggccatgacttgatctgcctcaagacccaaaatagaagccaatgcttctaagcccgttgccttgtgaacatttttggggcaccattccagcaacatttcccgagatttaaaaatttcatagtcttgaaataagtccggcctgatctgcttgatcgccgcatctaaaaagtcttgatcaacggctgtcacacacttgttgtaggataacgtagatggcaggtctttaaaatctgtctcaataaagttcaggtagggattgtaaagggaatagagagactttcgctctgcatgaatctcaaaaaccgttccctcactgatcgcatccagcggaagaccgagacgagctgtttcatcatgaatggttgcaacgtcttctgctgccaagacaacttttgagaggatctctccattatttcgttgcaccaaaccaccgttgaaagtaattgtatactcttctttgaggcctgctgttcccaattcttccaaaagaaaatccatagctttcaaggggcgaccagtggttagaaccaccttgacaccttgggcctgtgcagcagaaagggctgctctattgcgaggagaaatctttttttcagaattgagaagggtcccatctaaatccagcgcaatcaaggaaatctgactcatacgatttcctccatgtagcgtaggacagaaccagtcgcatggtggccgatgattttttcagcaatcgctaagatttcaggacgtgcattttccggcgctacaggatggcccacgacttgcatcatatggaggtcatttaagttatccccgaaagccatcacctgatccatcgagatccctagtttatccgctaaggcggtaatggccactcccttatcgacataatcgaggacaatatcaattgattcaaaacctgtcgtcatcgctttgacaccggggatattctcagtgacccattgctcaccttcaagcacaagagctgcatcaaagttggtggtcaatttgaaaatttcatcctgaatatccgctaggcttttcactttttgaatgttttcattgtagtgctgactcaaggccagatagtcgggatctactgtttctaagacatagctcccttttttcccagtcaaaagaagcttattcgggtctgcataaggggaagctttcaaagcctcaaaaacactcaaataaaagtttttggacatggtcgcttcgtagagatcttctccatgaaattctaccacactaccattttcagcaatgaaaatcatctggtcctcaaatcctttaaagagggatttgagagaaagaagggcacggccacttgcagcagcaaaatagatgcctttttctttgcagcttgctaataccttgcgtaaaaggtcttgatcgtactgatgttggtcatttagaaaggttccatccatatccgtagcgatcaatttaatatcattattcttcattttctaagtctttcaattttactgagacgattttagaaaccccagattcttgcatggtcacaccatagatggaatctgcagccgacatagttcccttccggtgcgtcacgacaataaattggctttccttatcaaagcggttcagataatccccaaagcgcttaacattggcctcatctagggcagcctctacctcatccagaatgacaaatggaatggtcttgacacgaataatcgagaacaagagggccaaagcagacaaggccttttctccaccactcatgaggtttaaggattggatctttttaccaggtggctgcactgaaatctcaacaccagctgtcagaagatctggctctgtcagaatcaaatcagcagaacccccaccaaacatttgacggaaagtgactttaaaggattcacgaatagcttcaaaagtcgatttaaagcgttccttgacttcgtcattcatgtcgttaatggtagacagaagcatgtttttcgcagccaagacatcctcacgctggtttgaaaggaaatcaaagcgccccttcacctcatcgtactgctcgatcgcatccacattgaccggaccaagtgccttaatatctttttcgatgctcttgagctggttttcagctgccgcaagattttcaacaggtttggcctgctctttggcttggtcaaagctttgcatgaattcatcggtaatttgcgttaaaagcttgttcaagcgatccgcatgcttttcacgtgtcgcttcagctttagcttgttgacgaatccactcttcgtttttcttacgagcttgttccatctgttctgccacatcttcggcctggccttccaaatcatccagctcaaagcgtttccgaatgattccttgttccagttccgttttcttggcttgggcctgcgtcaattggttggctagctgctccacatccactgtctgaactttggcctcaccttgttcaatcagcaattgcaactgatgctcttctacttccaactgggagatcgtttcttctaagcgacgaacatctgtttgctcatagctttgttggctcaaccattccgtctgttgaagtcgcaattttgccaattgctcttgcaagttttgtactttttgttgcaggacatctttgtccgacttcatggtttcaatgtcgcgattcagattttctttttgaagctcaatttctgccaattgcttggtaagggactccagctcttcttggagagactgggtcgcatctgttgccaattctgacttcaaagcttctaagagttcctgaatttctttcagttgctcttggctttgttggtaggccaattgggcccgctgttgttccagacgagcttgctcaccctggctttgaatagaagccaggtattcttgcgcctgcttgagcagattgtccttggtctctacctcctgctctgcttctctcaaacgagcatccagagcttgcatttcctgcttcaaactatctaattctggtttgacaaagaccgtattttgggaacgattggcaccaccggcatatgatcctccggtccgcaattcagtcccatccaaggtcaccatccgaacttgataattgactttacgagccgcctcacgcgcatgctccgtcgtgtcaaagatggccgttactccaagcaggttttggaaaatctgttcaaaccgatgctcataggtcactaagtcactcgcaattcctagaaatcctgcactggcttgaatcaattccaaattccgaggagatagttgacgggctttgatggtcgttagcggaaggaaagttgcccgtcccaagcgattgcgtttcaagaagtcaatcgctcgcgttgcggccttttcatcctcgacaatgatctgttggctgcttgctcccagagcaatttcaagcgccgtctggtagtcttttgagaaactcaaattctcactaacagctccacagatgcctcctagacgttctgcttcttgcaaaacgctcttgacgcctgcatagaagttactatagttcttctgaatggcttccaagctattgatccgcgcccgcttattcttgctctcatccatcaagtcaaacatggccgcttgagcctcttggtaggcagctttggcttgctccacttttaccaattgctcttggtattctactagtaaacctttgaccgtcgcttgtgcctgatccaactcttccaattgtcggacttctttttccttggcagtttcgaagtttgtttgtgctttggtcaaatcctcttgacgatggcttgattcttgaaggagtgcctggattcggctctcaatggctgtccgctcattcgatttttcagcctctgtctgtaagagtgcgacatactgctcgcgtagatgctcaatgacttgttccggatcttcttcgtagttggctaattctttttccaactcttcttgttgctgacggttctctgtcagtctttgttgaagcacagctagcgtctcttgtttttgagccagctcttgtttcgcttcttccagacgggctaaaacagcatccaaccgctcaagattttccctgcgactatgggctgcttgactcgattgcaactttgctacttcgatttgcttttccaaatcgctgatcaaacgagtaacctcaagcaagctggcctggtcctcagctaaactctcatccaactgatggcgggctttcttgatgcgtacattctcttcttctaagacctgacgacgttggtaataagaggccaactgttcttgaatggccttttcttcttgatcagccttttcataaaggtcctttgtcagatcgacttgagcaactaaaacatccagcaagagaacctgccgttcttggtctaattccaagaaacggcgagcgacagtcgcttgcttttcaagaggttggatctgtccttctaattcatagaggatatcctccagacggtccaaattctcctgggtttggttgagtttggtttcggtttccttacgccgcgtcttaaatttcaagacaccagcagcttcttcaaagatagccctgcgttcttccggtttggagttaaagatctcctctacccgaccttgagagataatagagaaggaatcccgtcccaatcccgtatccatgaacaaatcatgcacatctctgagacgcaccttcttaccatcgatcttgtactcactgtctcccgagcgataaatatggcgctcgacccgaatttctttacctgcctgctggataaaaccatcctggttatctaagacaaccgtgacacaagcataattcagcggtttacgcgattctgtccctgcaaagatgacatcgggcatcttgcccccacgtagactcttgacactggattcacccaaggcccagcgcaagctctccgtgatatttgattttccagatccattaggccctacaacagcagtgactcctttgtcaaacacgacttttgtcttatccgcaaaggatttaaagccttggatttcaatctcttttagatacatggcccatcattcctcgtttcaactgcattgcgggctgcttcctgctccgctaacttcttggagcgaccatgaccgtgccctagggttttaccgttcacgaacacttccacttcaaactcctttgcatgagcaggaccagactcattcaccacttggtactggatctccacatccccgtgaacctgcaacagttcttgcaaacgagtcttgtagtcaatgacttgagaaaattgacccgtttcaaccttgggaatcatgacctgatagatgaagcgtttgaccgcttccacaccttgatctaagagtaaggcacctaaaaaggcttcaaacaaatcaccaagaatcgtatcgcggtcccggccacctgatttttcttcgcctttgcctagtttgatgaaatggtcaaattggcaatctcgagaaaaaccagctagactctcttcacggacaatcatagaacgaaatttagacaaatctccctctggtctgtttgggtgttccttatacaaatattcggaaataactaattgaagaacagcgtctcctaaaaattccaaacgttcgttatgtgaaatttttaagaggcggtgctcattggcataagaggtgtgtgtgaaagctgtatctaataaactgctatctgaaaaaacgatctgaaaccgttccgataacagggcttgtaatttctccataggaagcctactttctaataaattcatactcttaagtataccaaaaaagaagcacgaacgcacttcttttcctagttctagggcctgaattctccaattttaatcaggattttcctctgttggattttcaggcttattagggatcacttttaagagataataggtgataaaaatcgtcaaagcacctagagcaagcttcacccaaataatcggtgccagatagatcgaaatccccatcagaatgtagatctgaagaaggatccatttcttccgttctttggcaatcgatttggtctctcggtaatccgctacataggtttgataaagcttggtttggtagagccacttttcaaagcgtttggaacttttagcaaagcaagccatcgacagcaataaaaagggggttgtcggtaaaattggcaaaggaatcccaataattcctagtcccaatgatataaaaccaatcgtaagataaacaaggcgcattgttctctcctttacaagatgcatttctattaagccaatccttagttgacttactagctttttctaatcctttctcacttttttaaaaaagcaactaacacaacagcatagactagaagaagcaagattccataaaggattccagcccatttataatagcgattcacaccgcaataacgctccacataagctctactcggtttttcaggatcataccaaaccgtcatcgaagagcaaagtggaaattgggtctgaagggctgtattgaaagaaacaaatgaatttcgataaaaggtaatcgaattggctaacatatcttctctagtatagatgtttggcacatttctaggtccccatggagtagagatcgtttttaccagaaaataacgaaaagattttttataagccacgccatttacctcatattcaacaataggaggatttccccctcgaaatcgattatagcccacaacggttcctttgatggatgatgtagcaagccgaaccatctttttatcacggaaataaagataaaaataagtaccactcaaaaaaactaatgctaaaaatataactattgttgagagccaaaacagtagcattttagttgacatttatttctcctccgaatttggttggtagtactgtaaaaactcctcttcactttgaacaacatgttctttgctatctgtagagttttctgccggtatcctgatatctttaaaaatatttgtgccagatggaaatgccaatttaacaacattaagagttgtttctaatctatttttaggattgagaacataaataaaattgttatctatattattcaataatagttttcttgtttttggatactttgtatctaggagccagttatttcctacgttccaaaaatggaatttattatcttcaacatcaaacccattagttttaaataacttagaaaaagattcaagccattcaacaccaacacttagagagtgagttttaattttatcatttcgattatctattattttacctgttttcaaattaattaatttttgttcctgaaaagatttatctccaattttaccaactattaaagttatatactcattttctccatcaacgattattttctgagaattcgatataaacatcggaaaataatttttgttaaattctcgagttattttgaatacatccaattctttcttttttaatttagaatttgaggtatcataaacgttaatatgccaatattcaccatccttagatatatttcgatttaaataaggaaagttattatgtgttacatctcttgatggttcggctttcaatttcgcaccttgagaaataataaacttttgtcctacagcatgccccggaccgcctgtcttaactttatctcctagaattcttaattcatctaccactttctttttcgcagcccatgaaacactgattgcatctccattttcaagaaattcataatctgtgatttctgtatcagcaatccaatacttatattgaaataatttatttttatcaaatgaatgtttaacaaataatatagctagaaagataattgtaaatagtccaaaataaattaatttactcttaaaaatttttttcattcctcgcaccttcttattttagtagttatcatacttttcatctaagtaattatagaatttggggccattagaattatcatttttcaattggaagcaatttttggttcttcatattgaaatacttcgttttcttcgtcaaaataaatccattttaaatccaaataaccgatatatagtttcataattccaaattccccgcccaattattaagaaagctaaagtactcctatcatacacaattttagggtaaagagcaaattcatcactagatatagaaatcctcgaataagcatgcaaaaaaccagtcgcagctggttctataatgtagacaaactatttaaaagtgaaataagttaatcaattctgcaaagaaatgaaaaatgtgttccgagttttagattaaatcaagaaaataccaaaactttccgctgtgagaaaagtgcctgaaacgttatagtttcaggcactcggaattattgagaccttgggctcaataattagtcatggaacttcatagaagttcgctgacgtccgtactcacctaaggaaagttttcaagttgactttgtcttcagtctgaaattccccgcaggtggttttccatcttatatcttcgtcaaaggggtcgcggtatctggcgaggtatctagtacctcaaaatcatgaccgacagctagatctgctctggccagttggttctccatggtcatatgggccaattctttgatattgttctcttttgacaaatgccccagataaatcttcttggtgcgatttcccaaggtccggatcatggcatctgcaccatcttcattagaaaggtggcccagatcagacaagatccgttgcttcaaacgccaagcatacgaacctgctcgaagaatctccacatcatgattggactcaatcagatagccatctgcatccgcgacgattccagcaaggcgatcgctcacatagcctgtatccgtcagcaagacaaagctcttcccatccttcatcaagcgataaaattgaggggctgcagcatcgtgactgaccccaaaactttcgatatcgatatcgccaaatgtcttggtcttccccatttcaaagatgtgcttttgagcatcatcaaccttgcctagatacttggtgccttccatagccttccaagttgcttcattagcatatagatccatgccatatttccgcgctaaaacacccacaccatggatatggtctgagtgttcgtgcgtaatcaaaatggcatctaagtcttctggtttgcgatcaatttcagccaatagtcccgtaatctttttccctgataaccctgcatcaataagcagttttttctttggcgtctcaaggtagaaagaattcccactagaacctgaagctaaaatactatacttaaatccctcttctgtcattgactccttattcttcctcttctgtatcccagtcgtctttaatagcatctttgtcgtacggcaagacaatggtaaaggtagatcccttgccatattcactcttggcccaaataaagcctttgtgttgcttaacgatctccttagcaatggctaagcccagaccagtcccaccttgggcccggctacgcgccttatccactcggtaaaagcgatcaaaaatgcgcggcaagtctttctttggaatccccaagccctcatctgagatggagataatcaactgggcatctgtcgttttcatccctaccttgatctttccaccatcaggtgagtacttgatggcattgttcaagatattgtctatcacctgggtcattttatccgtatcaatttcaacccaaattggggtgatcggatattcccggatcagttcatacttcttggtatcttcttgcgattgactcttgatcttatcaaagcggttcaaaataaaggtgataaaggccgtaaagttggtcaactcgatgtccaactgactggtttcattatcgattcgtgacaagcttaatagatctgtgaccatgcgcatcatgcggttggtttcattgagtgaaaccttgacaaaatctggtgctactggctctgacaaagcaccatcgtctagggcttccagataggatttcacactggtcaaaggagtccgtaattcatgactcacattggaaacaaagaggcgacgctcccgctcttccttgtcctgctctgtcgtatcgtgcaagacagctaccagaccagagataaaacctgactcgcgacgaatcaaggcaaagcgcacacgaagacttaagtattccccattttcatcctgggaatcgatggtcaattctggtacttctgtaatcaagctgcgcagatcatactcgtctccaatcgaaagcaaatccagaatactggtattgagcacctcatctggattaacattcaattgcttggctgccatttcattgaccatgatgatctgaccacgtctgttggtcgcaagcaccccgtctgtcatgtaagaaaggatactggtcaaacgcttggtttcttgttccaagttttcatgcgtcaggcgaataacctccgacagatcattaatgctattggtcatatctgtcagttctggacttccttgcatgtcgaccacttcggaatagtcccctgcaatcagatccttaattttggcgtttaattgtctgagcttgatattgtccctacggttttctagcaaaagcaaggctaccacaatgataaacccaaccgtaatcagaacaaagacaaagttcgacgacattacaaattgttttagttgatcaatcattgtttctcatataatatccgacaccacggcgggtcaagatatattctggacgtcccggtgtgtcctcgattttttcacgcaaacgacgaactgtcacgtccactgtccgaacatcaccaaagtaatcatagccccacaccgtctcaagaaggtgttcacgggtcatcacttgaccgacatgggtcgcaaggtgatagagcaattcaaattcgcgatgggtcaagtccaattctttgttgcctttttgaaccaagaaggcatctggaagaatgtgaagatcaccaatgacaatttccgtatcggcctcattttcaagctgaggatcagccgcaaactcagaacgacgcaacaaggctttcacacgcgcttgcaattcccgattcgagaagggtttggtcacatagtcatccgcaccgatttcaagcccgatgaccttatcaaattccgtatccttagcagataggacaatgatcggcacattgctagtcttacgaatcgtacgcgccacttccaaaccatcaatctctggcaacatcaaatcaagaataataatatccggattttcagccgcaaagacctctaaagcttcccgaccatcaaaggctgtcaatacctcatagccttcttttgccatgttaaatttgataatatctgaaattggtttttcatcatcaactactaatatttttttcatcttacatacctgtttctaatgctacttttccttatcaatctctatcttcttattatatcaaacttatgaagaaatgtggagtctcaattgctggactttccaataagacaaagcaaaaagactgagatcattacatctcaatctttttattttttcattatttctcaacacgtgatttgttggagatatcagctaggattgctgctacaaactcatcatctttaaacattaaaacggtatctactttcagaggagataccgttctccttctttgaataaggaatctaaaatttctgactttctctatctgttcaattgatagatttcttcagagaaagaatgtaaaatttttgatataatatgcaggatggactgatggatatttaaaagataatgttcaaaagaattacaaatgagaattaaaaacatgtcagtttggacagaagtctctctaccatcatccatgcagaaacaagattatatgaaataaaaggagtaaccaatgtccggaaactattcaacacgtgaattccgcgagaaactatatgatgaccttcatgttcgattaagagatacagtgattttgatgtgttcgatttttattgcctctataggtctaaatatgaattcaacagctgtcattattggagccatgctgatttcccctcttatgacaccgattattggactggggtttggtttagctatttttgatacgcgtttaatcaagcaatctctaggggttttatttactcaagtattggtcagtttgcttgtctcgactctatatttctggatttctcccttatcttatgcaagtagcgaattgattgcacgaacctctccaaccatttgggatgttctcattgctattgcgggtgggatagcaggtgtcattggttcaagaaaaaaagaagcaaacaatatcgtgccaggagtagctattgcaacagctctgatgccacctatctgcactgcaggctatggtttagctaatggaaatgtacgatttttatttggggctctctatcttttcttgatcaactgtgtctttatcatgctaatcaatattgttggaacaagaattatgatgagacaatctcccttaagttcatttaaagagctaaacatgaaaatgagaattgggttgatctccttgattgtattattggttcttccagccagctattcagcagtcactctgacgatggatcaagcacgaaaagaagggatcaaacagtttgtaggaaaagagtttgccaatcatacgatcattaatcaagtctacaagtcaagtaacaatgaattggtcttgacggttgttggagatccgatttcagaagaagaattagaaacactccaccaaaaacaagactcttacggtattcaatctgttcaattgaaagtcaatcaagtccataattcgacaaaattagatagtgagacgaccaaggaattttacgaaaacattgacaagtatatcgatcaaaaactctctgaaaaagattctcaaaaagatctcgtaaaagaaaatgaagcagacaaggattgaggatattgaccttatctaactcgaggaagcaaatcttgggaggatatcctatatccaaaagttaatgggtagaaaggattgttgatgaggatactatttgtggtggtttagcagatcactactagctcagcttaatcaaaatgtaaaaaagcaacaactatttcagttgttgctttttaggtggctgagattttgttctaggttaaatggtttatttctcaacacgggatttatttgcaatatctgtaagaattaattctacaaatgcatccactgacatggtttctgtttctttttgaccataacggcgaacgtttacagcctgctcttccatttccttgtccccaacgatcaattggtaaggaatcttttgtgtttgagaagcacggatcttgaactgcattttttcattgcgttcatccacatctgcacgaacaccacggtcacgtagtttcttagccacttcccaagcatagtccacgtgtttttcgttcgatactgggataagggttacttggtgaggagcaagccaggttgggaaagctcccttgtagttttcaatcaagatcgcagtaaagcgttccatcgttgagataaccccacggtggatcataactggacggtgttcttctccatctgctccaatgtaatgaagatcaaagcgttctggaagcaagaagtccaattggatggtagaaagggtttcttctttaccaagagctgttttcacttggatatccaattttggtccgtagaaggctgcttccccttctgcttcatagtactcaacacccatatcatcaacggctgctttcaacatgcgttgagcattttcccacatttcatcgttgtcaaagtatttgtgtttgtcttcaggatcacggtaagacaagcggaatcggtaatctgtcaagttaaagtcttcatacacatcgatgatcaattgaaggatcttcttgaattcttcctcgatttgttctggagccacaaaggtatgaccatcattcagagacatttcacgcacacgttgaagtcctgtaagggcaccagatttttcataacggtgcatcataccgatttcagcgatacggattggcaattcgcggtaagagtgcacatggtgtttgtaaacttcgatgtggtgaggacagttcattggacgaagaacaaattcttctccatcccccatatccattggtgggaacatgtcttcacggtagtgatcccagtgacctgaagttttataaagttctacagaagcaattggtggagtgtagacgtgttggtagcctgctgctacttctttatcaacgatgtagcgttccaactcacgacggatggtcgcaccatttggcaaccagaatggaagaccttgaccaacttcttgagaaatcatgaagagatccaattctttcccaagtttacggtggtcacgttccttagcttcttcacgcatttgaaggtagttcttcaagtctttcttgtcaaaccaagcagtaccatagatccgttgcatcatggcattgtcgctattcccacgccagtaagcaccagcaacgttcagaaggtggaagatttggatgcgaccagttgatgggacgtgtgggccacggcagaggtctacatattcaccttgacggtagatcgttaacccaccttcgtcttctgagtgttcttcgatcaattccaatttgtatggatcatttttgaagatttcacgcgcttcatctttggtcacttcttcacgaatagatgggaagttttctttgacgattttcttcatttcttcttcgatacgaggaaggtcttcgttagagatttgaccagcttggttgtctgtatcgtagtagaaaccatcttcgatcgctggaccgacacccaaatggatatctgggaagaggcgacgagctgcttgggcaaacaagtgtgccgctgagtgacgcaagattggaagagcatcttcgtgatcaggtgtcacgatttcaatgcttccatcttcagtgatggcacgagtagtgtcgatgagtttgccgttgaatttaccagcaagggcttttttagccaaagaattgctgattgattgggcaatttcaaaagtagtaacgccagattcgaattcacgaacagcgccatctgggaaagtaatcttaatcatgattttctccttataaagtttttagtagctaaatgggtgggaggtgtctttgaacattggaatcatcactccttttgattttctcattaagaaatcaaaaaagcgacctcctcgaaaggacgtcgcaacgtggttccaccttcatttatgttcctcaaaaaagagggacacctctgattggctctaacgtagccgccgttttatgtttgcataaaagaatcacgagtagtcccaaacctatcctctacgcgatttccagccccacgcgctctctatcagatttcctagatttgatatgtctctgtcagttattatagcacgattgaaaaattttgcaagaaaaagtttcattttcaatcaaagaaatgcgtgattttacggattttcttcacttgtttgaccgaagccttcatcatcttcacagatccattgaccggaagagcaatcaccttggtcgggattttcacaatggtcttagacatccgcttaacccgactttgctcaggattcaaatcatttgaaaagtctttcgagatgattttatccaagtaaaattcgtagacccgacggccaaaggttgctgcagaaatatcatcaatcttttctgcccacttggtctcatcgattggaggcatctcctcaatcgcttcaagaatcgcttgtgccagatcactctcttcataaaagagctttccaaacatagggtcatcaatcacgtgatcgagataaggattgccatgagcgataatcggggtaccacttgcaatactctctaaataggtcaacccttgcgtctcactcgttgaagctgaaataaagaagtctgccgctttatagtaaagagctgtctcatttggtgggatcatccctgtaaagacaaccgcatctgaaatccccagtttcgccgcttgttttttcaaatcatccaaataaggaccatctccagcaacgatcaacttaacttttggattgaccttgaggacatcaggaagggccgcaataacagcctgaatattcttttcataagaaacccgcgacaggctcaataagagcgtttcatcttctgcgacttcatatttttcacgaagagcagctgtctctgtctgagtgatttccggccggtcaaacttagccaaatcaatccctgtcggaataatacgtttttctgccttgaccttgtacttttggagcaagtcatagacgatctcactaggacagatcacgccatccagatcgttcatataacttctcacaatgtatttgaccatacttgggcgaatgaccatacctctggcaatatagcggacatagtcctcatactgggtatggtaggtatgaatgactggaatccgcaactcgcgtccaatccacactcccaaaaggcccagtgaaaactcagtctgggtatggataatatccagctggtattgcttggcaatggcaagcgcctttgagaatccacgatatgcaacgcggcggtccttaaaggcgaagaaaggcacacttggaatccgaatgatctgccaatcttcatagcggttgacatctttatccgttgtcgtaaagataaagaccgtgtgacccaatttttctaattctgttttgagcgtccgaatactggtcgctactcccgaaacttgcgggaaataggtatctgtaaataaccctacacgcatcttacatctccaaaactgtttgataggcttcgaccaattgataagccactaagtcgatcgaacgactttcagcgaccttgtagcccgcctcccgcttgtctacttgaccgttcaagaccttgttcaaggaatccacaaattcgtctacattgtggcacaattcagatgacgtctcgtcgatccagccattgtatacgggaatatcccgcaagaccgtgtgctgatgactggccaaggcttccaaaacaacgattccttctgtttcttcataagatgggaagaagaaagcatctgaacccgtcatggccccttggaagaccgctcccttgaagtagccagggaattccacattactcggatgatccttttccacgatacgacgaatcttacgcggaatgatccatttgttgatagaacctagccaaataaagcgaacatccggcatgcgacgggccacttctacgaaatcttcaatccctttgcgtttaaaataaagccctgcacagatgacaaccttttggccttcttggatattaaaatgctttcgaaagacctcttcttttttcggatccttcttgtatttttccaaatcaattccattggagaccgcgataatcggtgtggtcaccccataagactgaatcaggtgtttagaatattcagatggcgtgatcacatagtctgccttttggtacatgtgagccaaatactttccaaacaagggcgcaaaaaagttagacccgataaaggaattttcaaaatcctcacgggttgaatggccatgcatgatgactttctttccacgacgctttgctgcatggagcaaaaggaaactccgtgggccataggtattgatatgcaccacatcataatctcctaaaatatctgtcgtatacggaatcccagccaaatcaagcgcatgcatttgatgctgcaaggctcgaccaattcctgatttttgtaatacggattttccttctaaatacagtaaaactttcataccttctattataccgaaataaagagtgcccagcaagtctctacctgtttgcagtataaaaaagaggctagaacagttctgttctagcctctcagactagtagacacgtcttcccaagtcgagactctagtctactaatccttattttttggtcgttccacgttggttgatcgtatgagacaacagtacttcgcgttcatccaactcttctttgtgcatgatcttagtcaacatgcgcatactgatcgcaccaaggtcatacaagggttggccaatcgttgatagatttggacgcgtgtaacgagtgacttgtgaatcatcgctggtgataatttcaaagtcttctggtactttgataccgtgatcagacaagccgttcaagagacctgcagccaattcatcccctgtcacaaaagcagctgttgcttttgacgcaatgatgcgttctgccaagttgtaaccttcatcgtaacggtacttggattcaaagacaagtccttcgctatagctcaattttttcgctttcaaagcttctttgtagcccgccaaacggatttttccattgatatcatccaccaatgggccgcttacaaaagcaattttcttgttgtgttttgccaactgtgtaacagcatcaacggttgcttgcttgtagtcaatattgacacttggtaattggtgttcaacatccactgtcccagcaaggacaactggcgtccgagagcgtgaaaattctgagcgaatcttttctgtcaaatgatagcccatgaaaatgatcccatccacttgttttgaaaagaggttgtttaccactgaaacttctttgtcatcgtcttcatcgctatttgcaagaacaatattgtacttgtacatttcagcaatgtcatcgatccccttagccaatgtagagaaatagctgttcgtgatgtttggaatcacaacaccgactgttgtggttttcttgctggcaagaccacgcgcaacagcatttggacggtaatccaagcgttcgatcacttctaaaacttttttacgtgtattttctttaacgtttttattcccatttactacacgactaacggttgccattgaaacccctgcttcacgggcgacatcataaattgttactgtatcgtctgtattcataagatttcctttcattgttgaaaatttcgttttcactctctaattaatcctattttatcacttattgtaaacactttcaagcattttggtaaaattttgtaaactcttgcttttttggggaaattttgacaaaatagatccatagaaagaaggtagcattatgtctaaattagatcaaatcgtcgattttcttgaaactgaaaaaacagatgtcgctgttgtatccgatcctgtcaccatcaattacctgactggattttacagtgatccccacgaacgtcaactcttcttgttcgtctacactgaccacgaaccacttctcttcgttcctgcacttgaagtggaacgggcgactgcagttgtcgatttccaagtggttggctatgtggattctgaaaacccttgggaaaagattaaaggggctatcgcaaaaccagatgctaaaaccgttgcacttgaatatgataacttgatcctgaccaaattcaatggcttacgtactgtctttgaaaaggctcaattcaccaacttgacaccacggattaaccggatgcgcttgatcaaatctgctgatgagatccaaaaaatgttggtggctggtcaatatgcagataaggctgtcaatatgggattcgacgccatctcactggataaaacagaaactgatatcgtagcagaaatcgactttggtatcaaacgcttgggttatgaaatgagctttgaaaccatggtcttgactggaaataatgcagctaacccacacggaattcctggaagcaacaaagtcgaaaacgatgccctcttgctctttgaccttggctgtatggtgaatggttatgcgtctgatatgactcgtactgttgctgttggaaaacctgatgatttcaaaaaagaaatctaccacttgacgttagaagctcaacaagcagccattgacatgatcaaaccaggtgtaacagcacacgacgtcgaccgtgctgcacggagcgtcattgaaaaagctggctatggtgagtacttcaaccaccgcctcggacacggtatcggaatggacgtgcatgaattcccttctattatggaaggaaatgacatggtgcttgaagaaggcatgtgcttctcagtcgaaccaggaatctatattccaggtaaagtcggtgttcgtatcgaagattgtgggtacgtcacaaaagacggatttggactcttcactgaaaccagcaaagacttactttactttgactaatcctttagtcgtttcaatatataacaaacatcttgtttcgttaataactataaaaaatgaggctgggacaaaagtcctagcctcttaattatctttggattgtcgagcaagacgcagtggttgagtgggctctactacgctgatttcatcagcttttacagccctactcaactgtgcggaggtgggacgacgaaatcgaattctaacgaattaccgatttctgtcccactctcttttttcttatgaaaccgattcgagtttcattcttttctgcgtatcttctacgacgtcttttaaagtggtttgggacatttctttttccatagcagtctgaatgtcctcaagctttccatctaaaacattatggatattgtggccaattgggcaggctggattcggattgtcatgaaaaccaaataattgacctgtcgaacctaagcattctactgcttgatagatatccagcaggctgatctcatcggctgcttttgcgagctcagctccgcctgtcccacgcgctacatggatcaatcctgctttcttcaactgagacaaggtctttcgaataataacagggttgacaccaacacttcctgctaaaaaatcactggttacttttgttttttctccttgtagagcaatcatgatcaagacatgagtcccaatggtaaagcgactcgaaatttgcataacttcactcctttctacccgttttgaaggtagagtctattgaacaaccgtcaagggacgactttcgttattcctattatactctttttagttgtaatgtcaacagttacactattggaagaagtcttctagccaagcatcgatttctcgatcatgaccttctctctgctcaatctcatgaaggagctcatgattgtgggtatgatgaatgccattgaccaaactttcataatacacttggtaataaggaagatggaggtcttttgcgagttgcaattctttttggacatcatagtccacccgtctaaaatcgacatcttttagccccatttgatcaaattcaagaatagcatacatggcccgaagatccttgcgaagattcttttccaaaaagaaaggttgaccgatcgacccaggattgatgatcagttctcctcctgtcccgtaacggaaaaactgctggtgaatgtgtccgtagactgcaatatcacaagacgggtttgtcaccaagcgatcaaaatccttctgctcaccaatgtggatcaattcgcgaccccaattcttatcaggtaagtggtgggtgatgccgatctttaaacctgcgatttctctatggacctgcatgggcgttttctgcatgtcttcaatttcctggggcgtgatttcttcaagaatatattgacactggcgcatgaggtagcgatgactgggtctggtctcatccaacatccccctcatagcccgccaaagactatcttcccagtttccaaggacttttaccgtaatcggtaactcctctaacagctccaagagggcccgtctccccgtccctggcatcaaactatctcccaagagccaatattcatccaccttggcttttcgactatcctctaggacagcttccaatgctgtcgtatttccatgaatatctgaaagtaaagcaattttagtcatgatcttctccttctctccattataacaaagagaagaaaaacttccacccaaaggtgaaagttttatgaacattccatgctaccagaaatgaaaactcaggctagaagcggacgcttcgtcgttggatttatctttttccaaagagttgcttaacggctttgtatcttagtctactgatttgagggcttcgagcatgtctacttttcgaagataatggtcaacataaattcctaacaggatcaagagaaggagcattcctccgacagggaagaggaaaacgccaagtccgactttagggtaaaagagaatggcatctggtgcaatcatagcaatgaggaattgatgaagataataaccacccactaatcccatgaggatccctatgatagacaataagatggtttcgcggtaaatatagagcgtcacttccttattatggaatcctaagaccttaatggtcgataattcacggatccgctctgccacattgatattggttaaattatacaagatcacgatggctagcaagatcgatacgactactagaatcatcatagtggtgtccaaggatttggcaactgaattaaagagggaaatcatcgaagcattctgactaaccgccttcacagctgcaagttccatcatgtcccgactgacagcctgcacttgtcgtgtagaaggatttctcaactgcaccaaatagctatttgctgaagtccgctttccgtagattttttggtaacttgcctgatccatatagataaaatggccgacataattttcagtgattcctgctaccttaaaagtgtgaccatctaaggtcagtcgatcaccgactgtaacccgggctagttgtgctagcttactactgatgatgacccctttcttgagagacaagggctctccttgcttgagagaacgtaagctgataaagggagaaaaatctgtacgatccgttaccatcatcgtaatggtctgcttgtcgcgtccaccctttaaagatgcttcgatgaccttactatagatggctcgataatctttgatatctgatttttccagacgattggttagttccttgctttcttggcttgatgcattcgtttttttggctacaatcaactcatatgataggatctcttgaaattggcgtttgggaacccctcctacagaagattgaatccctagccctgcgaagagaagagcaacagaacctgccactccaaaaatggtcatcagcatccgttgtttgtaacgaaagagattacgagcagtgaccttgtgggtgaaactcagacgcctccaaataaaatggagacgctccaggaaaatcctcgaaccggataccggtggtttaggaagcaataaaagattggcttcttcttttaattccttgcgagaaacccagtaagccggaagcacactcgcgacaaaagacagtcctagcgcaatcagagtcatatctccataaaaatactctctgctctctccaatcaccatcccttgcgtaataatattggaaatgattcccgataggaaataatggcccagcaaggttcctagaagggtcccgatcgtccctgcaaagaatccatagaggacaaatttgagaatgatgtccttggtacgatagcccagcgccttaaaaacgcctgcattggtccgctcttcatcgacaaagcgggtcatcgtggtaaaggtcaccatggctgctaccagataaagaacgaccggaaaaatatttccaacagcagagatactactactggcattgctatacatcaggtaaccttgtccacctggcatggtcttgcggtcatagacatgataagttgggatttccagttgatctcgctccctttgagcttttttcagctcctcctctttttttgcgagctccgattcacctgcagtccagtccttctttttctgatccagttgttctttggcttgatggagcttttcttgactggctacttgctctttagctggcagaaatggagctaatttcttgaactgggcctcctgcaagtctaattgtttttgagcctgatcgatctgatttttagctgactggagggtttccttggcacgactgagttctttctggcctttttgaatctgcccatccgcctcctgcttgagtctttgatagcgagcctttccattgtctttcagaagtttttctaactcttcttgatgagctttgagccctttttggtagacttgcgaaaaagaatctaaagacttcagatcatcaaactggatccgcgccatcgcgggaagtttagtcgtaaagacctcttttgaaactagtgcataggcatctagatttccactaccactcatggcagtgcctaaattcttttgagaccacatctcagaggattgaacaaaaccaacaatggtgaattgctttcgctttaaactagagcgcgttccagccttttcttcaagtgtgagggtatcccctatctgatagcgatcctcccaaaaacttgctagggccagttccccttctttttggggcaggcgccccttggtcacacgaaagaaagaaagactttttggggcagaaaacagtcgaattgcctttcctgttcctttcactgtcagatccagcagtgaaccaaattcgacacgcgcccctttgactcctaaaagctcctcttggtctgcctggtctaatcccaagtcccccatgacagcaagatctagcatcttttgttgctgaataaactggttagccgttcgatgcatatttggagtagtcacctttaagcctaccaaggccaagcttcccaacaacatcaaggttaagatggagagaaaacgtccttttgaatgtgtaaaagaaccaaacagatccttccaatagacttttcgtttcatgctagcacctcttctaatactctagtgtagcaatatcttgaggaagctcattgatttctaccgacttgaccttggcatcatgcatgcgaatcacacggtctgcaatcggggctaaagcagcattatgggttacgatgatgaccgtcgctccctttttacgagacatggcctgtaaaatccccaatacttgcttacctgtctggtagtctaaggctcctgtaggctcatcgcaaaggagaattttagggtttttcgccactgcccgagcaatcgccacccgttgttgctctccacctgacaattgggcaggaaaattatcaagacgattgccaagtcctacttctcttaaaacggcttccggatccaaggcatcagagacgatttctgaagccaattcgacattttccttggctgtcagattggctactaaattataaaattgaaagacaaagccaacgtcatctcgtcgataatccgttcgttgatgggaattgagcttagaaatatccaccccatcaatcagtacctgtccttcgtcattcgtgtccatccctcctaagatattgagaactgttgattttccagctcctgacgcccctaaaataatgaccaattcgcctttttcaatctcaaaagaaacatcctgattagcgagaatctccgtttctccactagtgtatcgcttgtaacagtgctgcatttcgatgtaggccattttttctctcctccctcctatttcctatctatattatagtccttttcgtatagattacaaagaaatcgaggcatcaccaatagtgattcttcctcattatcatgaactattataaattttatgctataattagagagaaatttgatttattcttagaaagaaggctcatcatgagtttacaacagtttgaaaggaaatctcttcaagaaatcaaccagtctattgacgtgccaaaaggcatccccttttggaagactcttctactcttttcaggaccaggaagtctggtagctgtcggctatatggacccgggaaactggattaccagtgtggtcggaggggcacaataccgctacctcctcttatcagtggttcttctctcctctttaatcgccatgcagttgcaacaaatggctggtaaactagggattgtccatcgtaaggatctggcccaaacaaccgcccatcatttaccaaaatggcttcgctataccctttggattgtgattgagcttgccttgatggcgacagatttagcggaagtcatcggatcagggattgccctccaccttctttttggctggcccttgctcttttctatcctgatcaccatctttgatgtcttcctattactggggctcatgcatctaggatttcgaaagatcgaggccatcgtatcaaccttgatcctcacgatccttgcaatttttggctatctggtattcctatcgaaaccagatatcggaggaatcttcgctggcttcctccctcaaaaagaggtgctaggaatcggtcttccaaaaggaaatgaagccttaaccttggcgcttggaatcatcggggcaacagtaatgccccacaacctctatctccactcttccatttcgcaaacgcgaaaggtggactacaaagatccagcagatatcaaacgggcagtgcgctttatgacctgggattcaaatattgaattgagtttggccttcgtcgtcaactccctcctcttgattcttggagcagccctcttctttggtcacggagataagatcggtgctttctctagcatgtacaatgcgctcaaggataatcatatagccggtgctatcgctagtcccttcttatccaccctctttgccatcgctttgttagccagtggtcaaaattcaaccattactgggaccctaaccggtcaaatcgttatggaaggtttcttgagattccgcttaccacaatgggtcgttcgtctcatgactcggatcattgcccttcttcctgtcatcatcgttgcgatcttatttggagatcaggaacatgtccttgatgaccttctggtttattctcaagtcttcctatcagcggctcttccattctccatcttccctctggtttatttcacctccaacaagaaaatcatgggagagcatgtcaatgcgaagtggaacactttcttaggctatctcgttgcgattgtcttaaccatcttaaatttcaatttgatcgtgacaacttttatcaaataaagagagagtgggacagaaatcggtaattcgttagaattcgatttcgtcgtcccacctccgcacagttgagtagggctgtaaaagctgatgaaatcagcgtagtagagcccactcaaccactgcgtcttgctcgacaatccaaaaataattgagagactaggacttttgtcccagcctttttttatttattacactcccttttccatcttgctcctccatttcctaaaaatttcctgaccatttttttaggagggaattattttaaatcactaattattgtgagattttcacaaaatcttgtcagggcccgtcattcataaacttgtaaattttttgtacactttccgttatctgtacaaaaattagaattgttgtctaatttattcttttggagtataatgctctttgttagtgtcgtgaaattatttaacatataaattattttaacgtcaaataaataagaataaatttatacaactacagaaaggaacatatggtacgccaaagacaaacaacaaccaagtcagacttacgaaatgcgctctcaaaactcctcttgcaacaaccttttgaaagcatcactattcgacaattaactgaaaccgctgggattaaccgcgggaccttctacttgcactatgtcgataaatacgacatgtttgagcaaatgaaaatggacatgatgcaagaattggatagcctcttcgttgaaggaagccctgtaaaggtgaactttcttaatgtgttgactgctattaaagaaaattatgattttatttatgcattgtcccaatcctgctgctcggacttccgtaaattggtaagaagttttacccttcatgcactagacgatactccccatgcgaaagaacacatcatttcagactttcaagttccatacaagtatgggctagaaattttcatcgctacgattgaatctgtgattgtgacctggttagaatccggtgccaaggaagagccaatcgaaatcgggacgatcattctcagcgtctgcgactttgctagctggaactaaattccccaaccttttcctacctttatggagaaggtttttctttttggcaaatgaacaacatatagatcaccttgttcaacttgtttgtagaaagcaaaaaagcaggatgctaggctcctgctttttctttattttttctttgccaacatggttgcaaatcgaagttgaatccgatggccattctcatctcgccgatggagatggcctggattttcattgtacttgaccaattcccaatccttgtaatactccgccaattctccttctttgaaggtgaacgagaagggcatctggcaaggataatcttccgtatccatggcacagacaatgagattatagccccctggattggtatgctcttgcatattgcggataatcgctggaatccgatcagcgtctaaaaacatgaggaccacagttgatacgatgaagtcatagttttgggtaagagctgcagcattgatatcatagaggcccactggcatgtccagatcttcctcagcgacaatactttgtaagatttcaagagccagttcattttgatctacagctgttacgtcaaagccatgttgggccaaaaagagggcgttgcgtccttgcccgcatcctagatccagtgcctttccagctgggacaattcccactgcttctagcacttctgaatggacaggattggtgttgtattttttggggaaatagtcttttggctcacagtaaaattccaagtaccactccacatcgtccgtcgctgcttccacacggtgccaggcctggggctcggccatggggttctctgctcctgcttcaaagaggtggctcgcgatttcttccccctcttcggtcaattcaataaatcgtaactgaccttttaaaacagtaatctttccccaggttcctaccttggtattgtgctttctttgaagagcttctggcatggtatccttggtccagataggcatgcgtttgtaagcgatcaatttttgtgtcatgctgcttctcctttttctttcactacccttatcatacagaaaaaagcccctttttacaagttggaaaaagaggctccgctttctagcgaaacctccttgttaggatctattcatcctctttattttttgattttttataaaagaatccagctaaactaaatccacaaacagccaataccccaagaaggactgagaagaccacacttgaatcttgagtctggctagcctttttaggggtatctccgagcgcttcctgacaagtttctggcttcttgtctgaactgtctttttcagcagcagccattaaattcgctttgttatagccatcgtagacaaagtcagcttccaagcccttttcttcacgaatcttatcttccatttccttttcagtagccttgatttgtttgaagattacatctgctcgatccatggattccttggtgacttcaccttgaagagctttggcttggtcatctgtgagaccactatatttttgatccaaagcagcttgttccttgatccagccggcttccatttttttccatttatcttggatactggtgccaaagaggtctggatatttcatgaccatttggtcgatgtgccaaacagcccaataccatgaagttggatcgtacttagcagagcggactttaaaggcaccgtaggtgtcattgactaagccatagaatgggacatatggggtattgcgactttgggcaagacccaaccaaacgattccaccaaatggacttggtaagtctttcttgatttgatagacatgggcatcaatgacgttttcatttcctagagcatacttgtatttcttggtatcaacttttttacctggttcggccaagtcatctgctgtaaattgtttgaggtgttcaaaacggttccgttgttcggcaaaaacatcttctagactatacttcttagaaggatccgttggtttacgaagcagatcaaagtgttgatcatcatatttgacatctgcctttggatccatcagggtaatccctgcataggtccgtgagcggttgcgttcggtgtattcgtccggaccataagaatccgcaatatggaatttgccatccttatccgtcttgtaatgatcggctttcttagctactgcttctacatcttttgaagcaatgacattgtccttgtccttgagatcgacatgtcccagatagtaggtattggcaaaaatagcatagcggtcttgtgggaatttaatggccacatattggtgacctgagaggatttccatgtaccagagctcatttttatctgctacgacaataatattcccttcagcagaacctttttcatccagagtcttggcaacgatttcgattccttctcgagcagtttttgcacgaggcaagaccaagtcgatcatggaagcttctggtaggccatctttgaccaaagggtcggctttcaaaatcttgtcatgcggagtcgctgataccgtcgctgtcatcgacacgcccacttcattaaaaccatgagctccgaagttcccgttgctaccatcaccacgcgcagcatcataggtcgctgtgtacttcatttcatggctcaaatgaggataggtaaagccattggactcatcttcgatcttatccccttccttgtagtcctttgctggaactacaacaaagttttgattgtggcgcccgccatctggtgcatagggatagtcctctgtacgaccgtaaagcatagagccatccgtggttaagtcctttcccacaatgaaggcggaacaggcttgtgcaacctgcacagggaagagagcgatcagcatgaggccaaacagtagtttgaataggattttcttcatagtctttctccttattgactacaaaagaggctagaaaaactttcaagcctaagaaaagcaactataccaacaccctaattttagtatataatataagcaattgttttgcaagcgattacaagcagaaagcataaaaaagacagatctgaaacaagtttcaaaactgtctttttctttaacgtgtattgtattgtttcatgacccgtgcgatgtcccggttttgttcccgacgcttgatggattcacgcttgtcataatcatgtttccctttagcgagtcccaaaagcaatttggcatagccgtccttgagatagaccttcaaaggcaccaaggtcattccggtccctttggtgtcttggtccagcttttggatttgctttttatgaagaaggagcttgcgacgacggtctgggtcttggttccagatattgccttcctcataaggggcaatgtggacattgctaagccaaacttcgccattttttacttgtgcaaagccatctttcaagttaatgcgtgccgcacggacacttttgatctctgtccccgtcagcaccatccctgcttcaatcgtatccacgatggtgtagtcatgtctcgcctttttattttgcgcgactacctttccttcgccctttgccatgtttggctcctttctttgctacttccttgtaaaatggtttcttcccttttttctttttggatttagaggaagaatctttccgcttgtcatcttttctagcggttgatcccttagaaacttttttgtccttgcgtctgcgatctctacgattgccatctcggtcacgtcctttagacttgagacctttttcgacgacatcccattcacttggaatataagagaaatcaatctctcctgtcatcttgtcggctctttctaccttgatccggatttgctgaccgacacggaaggtcactcctgatttttctccgcgaagggttagatcccgttcattaaaatggtagaattcagggagattggtaatatggatcaagccttcaaccgtatttggcaactccacaaagaggccaaatttcaccacactggaaaccacagcatcgtactcttccccaacatagtcttccatgtattctgccttcttcatagcctctacttcgcgctccgcatcaatagcccggcgctcccgactagaggattggttggcaatgtctggaaggacttgttcaaagtgttcagccacttcttgagattttccatattcgcgcaccattcggtgaaccatcaggtccggataccgacggatgggactagtaaagtgggtataatattccgcagcaagcccatagtggccatggttgtgctctgaatagcgagcttgctgcatcgagcgcaacaacatcattgagagaacgtctgcatagggttctccttcgaccttgcgcataatttcttgcagggcttcttggctcatctcactagccgttccgtagatctggattccaaaactagaagcataatcgataaacttctgtactttttctgcctttggatcttcgtggatccggtagatgaacggtagtttcagtcgcgtaaagtgctccgccactgtctcattagcgatcagcataaaggactcaatcatccgctcggcaattcctctttgacgaaggacaatgtcgaccggttttccttctttattgaccagaattttagcctcattggtatcaaaattgagggctccgcgacgaatccgcatgctttctagaatgccatgcaaggtggccatttgatgaatacttgggacaattttcttaaaggtttgagccttttcttcgtctcccgctaagatatcattgacgtcgctataggtcattcggaaggttgtgttgatcactgtttgggtaatggtatgcttgacaaccttgccatgaggatcaatctccatgatggcagactgggtcaggcgatccacattcggatttaaagaacagatcccattggagagacgctctggcaacatgggtactactcggtcggtcacatagacagaggtcgcccgatttagagcttccttgtcgagtgctgaaccttcctgaacgtaataagaaacatctgcgatgtgaacacccagctcaaagttgccattcttgagtaacttgatatggaccgcatcgtccaagtctttggcatcagccccgtcgatggtaaaggtgatctcatctcgcagatccaagcgtccctctaaatcctttgcagacggtgcatctggaacctgctcggcttccttcagcacttcttctggaaattctgagacaatgtccatggattctaacacttccaaaacatcgattcctggatctgtcacatgaccgaccacatcccgcacagtcgccacaaaataattgtgtttgcggctcgggtattgatcaatttcgactttgaggatttcggtcccttccaattggatggctggcttcttcacatagatcagctggctgatcttttgatttttcgaacgaatgtagccggcatatctaggcttttcctcatccagaacgatttgtccaactaccgttttaatgctatgctccaagacatcaataatcttagcttctgctgccgttcctttgtttcggtctgctaccttggtaatgacgatctcaacggtgtccccatcgatagcgtgattgacatcatttcgaccaacaaagaggtcctcttcttcaccttctaaactgacaaagccaaagccatttttatgcgcatgaaagatccccttgagggtaatagctggggccttcttttgagccaaacgaagagagccatcatcttcgaatttcaactcatggcggcgttccatcagagagatggttttgaccaagtcacggaaatccttagacccttcctttcctagagctgctgccagatcattgatctgggctttgtcatgctcttgtaaatattctttaatacttgttttcatgaatgtatttgctggttatccagcctccttttttctatctaaatgtgtctttgttttgcaaaataaaaataggcaaagacattgtctgagcctatcttatctactagaaagtaccattaagatcatcgcgatcaataaccaaaagaagatcataatagctgttaaacgctgcatcacggcttcaaacccgcgcgcttttgaacgttcaaacaagtcatttgagcttgcgtcaaagacattgctcgattggttttttgttggttgcataaaaattgcgataataatcaatactgataatactagtaaaatagttgttaatgctccgctcatattcaaaactccttaaaatcctcactattataccatgaaaatcattttgattcaatatgtaaggttacttttctttccttgggacaatacttcaagacctcgatcttttcgggatgggttttggtatttttactggtcaaataattctgactcccacagcttgtgcaggtcaattgaactttaattcgcacgtacgtctctcactttcaaatactttctaaataagaataagaggaacatcaaatcggtaaaggctaagagggctgtgccgtaaaaaacccaatgatagccaaaatgcatgaaaatactcgatcccatcattggccctaacacgccacctaagtagtaaaagagctggttgtagctaaagatccgagagattccttcaggaggggttaagcgatttaacaaagcagaaactcctggtaaaagggcaccagtcccaatcccaaaaaggaagcgtaagattcctaattgcaggggtgtttgcgcttgggcacaaaggatatagagacagccactataaagaagggcgattaataagagccggtgattcccaattcggtctccgagttttcccatccaacctgaaaagagcatactagagactcccatagccgaaacaatcatccccgatacaaagatcaggttatctctttgtcccaaagctcgcacataaagaggcaggatcggagaaatagattgggcgatcatttgaatggtcatgctggtcaaaaagaggcccaagagaatatccttctgctgaatggacttgagcaactgccaactggatttttgttcttcttttggaaggggctcatagtcttcctcgatgccccagaaggttaagagggaaaccaaaaataagaagaagccgaccaagagaaagacattgcgcattcccagattttcggcaatgagtcccccaatcaaagggcccatcaaggttccagccacgacaccggtcgacaaggtccctagggcatagccagattggtccttgggaacttgactagcaatcagggctgtactattggggacaaagcctgaaaaaaccccattgagcaagcgcaggaccaagagccaaaagacggacgggacaaaggcaatccctcccatggtcagcgtcatggcaatggaggctctaagcatcataggttttcgaccatagcggtcggctaagctcccccagatgggagacatgatcgcagaagttacagaagaacttgcgacggcaatcccagcataaaagggaacagccttgcccgtaacacccaactcttccacaaagagggccataaaaggaacgactaaagaaaggctggctccgatgaaaaagcacccgatccaggcaatatatagatttttacgccaattgatttctcttgtgataaaatcatcttctttctaattgttttagggctgcatctaattggacatagagggcagcaagatcgccattattgtctaagaccagatctgcatgggctcttttttcatctagcggcatttgagacgcgatgcgttcttgggcctgcagttctgataagtggttgcgttccatcaggcgcttgagctgggtttcttttgatacagctaccaaccagacagattcaaaccactcgtcatagtgctgctcgattaagagaggaatatccataaaaaagagatcggattgtgcagcttgtctgtctcttacctcagctagagcctcacgaataagccttccttggacgcgattggaccagtctctttcactaggggctgaaaagatccgctgacccaaagcgacgcgatccaactctccttctttggtaaggatctctctaccaaaatgatctactaggacacggtagagggctcctcctggtgcttgcaaatcatgaaccacttgatccgcatcaatgacaggataccctttttctctcaaataggaggtgacagtggattttcctgaagcaatccctcctgttaatccgatgattcttgccatctagttctccttttggcagtgggggcaaaaatgggttccgcgtccccccagctggattttctcaatcggtgtcccgcagcgcaaacaaggctggcctgtttttccatagacctggtgttcttcctgcatggtgccatcctcgccaaaagcattgctgtaggagcgaatggtggagccacccttttcaacagcttgagcaagcacagcaatcgtttctttgcggattactttggcttctctagcagtcaagctttgacccaaacgggctggatgaaccttggctcgataaaggacctcatccacatatatattgcccagaccagccactaatttttggtctaaaagagctgatttaattggtttctttgattttttaagagctgcttggaaggctggttctttaaaatccgcttccgttggctctggaccaatctttttcgccaaaaaatagctctcgacaagctcaggtatgatgacttccatggtcccaaacttgcggacatcttcatagaccagagtgctaccatctgtaaaatgaaagaagacatgggcatgcttgcgaagaggaacctcgtctggataaaagaaatacttgccttccatccgcaaatgcgagatgaggaccagatccgtcagataaaataaaaggtatttcccacggcgccccatgacacgaatttcttggcctgggagatcttgacgaaaagtatccagatccgtctgaatcatctttggatactttacttccacggactggatggttttcccaagaattaatttctcaagaccgcgtcgaaccgtctctacttctggtaattcaggcatagaactcctttcaaaaacaagaagcaggccttctgcccacctcttcttaatattctttttcgttgtatccgaaatcagctaggtctaatttcttatcccgccaatttttcttgaccttaacccaagtttctaggaagaccttatcccccagcatgagttcgatatccttgcgtgcaagggttccgatcttcttgagcatggcgccgccttttccgatgacaatccctttttggctatcgcgctcgaccatgatggttgctcggatatggactttatctgtctcttcatcccgcttcatagaatccaccactacggcaacagagtggggaatttcttcccgcgtcaaatgcaaaaccttttcacggatcatttcagagaccaagaagcgctctgggtgatcggtgatttgatcggcagggaaatattggaaaccttcttctaagttttcacttaaaatatcaatcaaacgtgaaacattgtttccttgaagggctgaaatcggcacgatttccttgaaatccatttgactacggaagtcatcgatttgcgccaagagttggtcagggtgcaccttgtcgatcttgttgaccaccagaataaccggcaccttagcagccttgaggcgctcgatgatcatgtcatcgcccttcccacgtggctcatctgctggcaccataaagagaacggtatccacttcacgaagggtgctataggccgactccaccatgaagtctccaagcgctgtcttgggtttgtgaatccctggggtatcgataaagacgatctgttccttatccgtcgtataaatccccataatcttattgcgcgttgtctgcgccttgtcactcatgatggcaatcttttgccccatgacgtggttcaaaaaagttgacttcccaacattgggacgtcctaaaatggctacaaaacctgatttaaatgtcatattatcctttcacgagggcatgctccctcttatccaaataccaaggcccagaatttgggcacaaaaatcaccagtcctgttagtagggcaaaacctgatacgacaaggactgctccagccgccatgtctttggcattctttgccaacatggagaaatggtagttactagctaaatccaccacattttcaatggctgaattcataatctcaaaagcaatcaccaaggtaatgctgagcaataaaaagagccattctgtcgcagaaatcctaaataccaaaccagcaagaattgctgcaagggctgataaggcatgcttgcgcatattgcgctcttccttgatcgaagtaaaaattcctgttatcgcaaactccaggcttgaagtgaagtcccgatttttccattttcgcttattgtcttgtgagtccataggccgtcaaaatctcttcctgtaagccaaacatttccttttcttcttccggcgtatagtgatcatagccattgatgtgaagaaaaccatgcactgctaaaaatcccatttcgcgctcaaagctgtggccatattcttcggcttgctcacgcgccttgtcaattgaaataaagagctccccaatataggtatcgaattcagccatcatctctgccaattctggattttctgcaaggtcttcctcgtcaaaagaaatctccatctctggcttgtattctaaactgatgacatccgtcgggcgatccgtatcacggtattcaagatttagttcatgactgcgttcattggttacaaaagtcacagccatttccttgtcttctttcccaattttttgagcagcaaattctaaaatttcttgcgtttgttttaagatttcgtcagagacttgaccagtctcatctaccatttcaatatacatctggatcacctcactattatcacttcattatagcataaaaccagcctatatactagatacaggctggttttcaatctttttctttgcaggataatcttacaccactgtttgctggatggcattcatctgggcatagatcccgccttgtgcgaccagttcctcgtgtctaccacgttccacaatgcgtccttcagataagactaagatctgatccgcatcttggatagtggacaagcgatgggcaatgataaaggtggtccgtcccttttgcaggactgccatagccttctggatgatttcttctgtttccgtatcgatgtgagaggttgcctcatccaaaatcagaatttgcggattcatatagagcgtccgcgcaaaggaaatcaattggcgctcaccacttgaaaaggcggatcctttttctacgactggatggtcgattcccttttcaaggcgctctacaaagggccaagccccgacttttttcaaggcgtcttggaccgcctcccgatcaatgtgttcctgactcatggccacattactagctatggttcctgtaaatagataaggatcctgtagaacaatccccatatggctgcgtaagctctcacgagagacttggcgaatatcttgaccatcgatcaaaatcgctccttcttgaggatcataaaaacgatagagcaggttcataatcgaagacttacccgatccagtatgacccacaagagcaatggtttgcccaggacttgcctgaaaggcaatatctctcagaactggcttgccttcttcataggcaaattgaacatcgttaaacacgacttgagctttttctatcttcagttccgatgcaccatcggcctccaaaggttggtctaagaaagcaaggacgcgactccccgtttctaaggatctccgaatattcggaaattgacgactgagattggccatgagatcaaatagattaatcacatagttaatattgataaataagaaaccagccgtcacaccgatattgccctgtaggaaagaaatcccagcgatggtcaaaatgcccgcaatcactaaaaacttgagcaattccgttaaggtccaagaagcaatggaatcggccaggaggattcgatcattggctcctaacatcttctgggtagtggcttcaaactcctccaccacaccaggctcttgatgatagagctgaatcatactggcaccatgcaagagttcattgacctgggtattgacctcgcttctcgcatcaaagaaatccttcataggctggtccgtcatgaccttgtagagatactggatcccatagaaaatcggaaagaccaaacacaagagaaggcccatcataggactcaggtaaaagagaatccctaggataaagagaaagcgtaccaaatagatgactaaaatcatacaagagttataaaactgggtccgcaaggtctccgtatcattgacaattcttgtcgcgatcttcccagccggcttatcatcaaaataagaaataggcagcccttgcatgacttgaaaggcttggtccctcagactagcggttacttggttacttccatgcagtaaaatccgattgcccatgtagctaatcagctgccccaggctcaagaccaagagatagaatcctcccatctgaagcaagtccccttgcccgccaccgtggatcagtgcggtcaaaggcccatcgatcatcttttggagaagaaagggtgacaattcagaaaaaatggtggctagtaagaggcaaataaagccagcaagaaagacagttggataaagcgtgatcctcgataataatcgtttcaatactttcatcttattctccttcctgtttttgttgccgttggtattgttcataataccagccctcttgagctaataaatcactagccctgccttcttctacaatctgcccttgatccaagacgatgatccaatcagcctgatgaacagccgacaagcgatgggaaacaatgatggtcgtcttgtcttttcgttctttttgaatcgtgtcaataatggcctgttcagtcttcgcatccaccgccgaaagggaatcatctaacagcaagagctcagcatctcttaagaaggcacgcgccaaagagatccgttgtttttgacctcctgatacagagacccctttctcaccgatcagggtgtccattccctgagacatccgctcgagatcatccgcaaaagcagcttgggctattgcttccaccaagtcatcttggctggctccttttttaccaagcgctatattctcacggatagacttggagaataaaatatgttcttgggaaacatagccaattttttcttcgatggagtgtcggttgtagtccacgatcggttgctggttgaccaaaaactctccctcaccaactgggtactgccgcaagaattgtcgaaccagggtagtctttcctgcaccggtacgaccaacaattccaaccgtctgtcctttctgaatggtccaatcaatgcctgacaggctctttcgctcaacaccaggatagctgaaagaatagtccttaaactgcaccaaatcaatctgctctaagtagtgaggaccatctggctccagatcatccgtttcatcaatcacttcttttaattttttataggacatttgacctgtctggtagaccaagatcaggtccgccatcatccacataggctcaattaagaagaccaaatacagctgtaaagccaataacttaccaaggctcaactgcccgcttgccagggactggcctccaaatagcaggagcaagaccgtcgagaatccaataaacaacagggctaaaggtccaaaagaatactggatagaggcaattttgtcccctgttttggatagactggctgtttttttctgaaactgtttgacctgctggtcccgtctactataggcccgcatgacccggatcccttcgatcgactccaagacctcatcgttcaactgagcgactgcttcccggttttgctcaacatactcctcctgctttctactcaaaaaataggtagagacgacgaggaagatcatgggaataaaggaaatcaaggttaattgccaagaaatgaaaaacatggtcggaataataaaggcaaacaagccaccgccaaacaggagcaccatcatcccgtaaccagccatatcggccatcccatccacatctgtcgtaaagcgcgtcaagagatctcctgaacggaatttctcaaaaaagggacgccgcatagctactagcttacgaaacgcttgtccctgaagggtcgccttgaaatggactgacgactgaaagaggcgcaactgccaataaaaagccgtcaggtaattgaggatggctgatcctaccaagaggaccatatcccatacaaagttcgattgcgtcagcgtctgctgactcaaatgatccactaaacgctggataacttgcgtcgggatcaataaggtgtaatcataaagaatcaggaccatagcgatcttcacatatcgccacttgcgttccctgatatactcccaaatagctctgatcatatattctccttttcaaaatggcacagaaaaacccaagcaaggagctgagtacgtgctcagtccacacttgggccttctgatgcctatcaccaattcagttaaggcaggtaaaaatgcatacaaaaaacccaagacaaactcctccatcttgggttccatttatagtttacatcgaactcaactgagattggagaagctgtgtattcaattgtgtcatcaaaacatctactttgttcatgatggttttctcctttctctttgttgttctaactttaccacggatttccttgcttgtcaacgtttttttgaaaattgttgaaaaaaccggacttttaaagatggactcgcaaaaaaagaagcctagaccctctctaagcttccctcttctgctatgctagttgccgggattgaaccggcgacctcatccttaccatggatgcgctctaccgactgagctaaaccagcagtacctatctactatatcatggagataggtcttttgtcaatatcctgactcattttttctgccaaatattcttctttagtgaggacataatgaactctcgtcaccattctcccttcttcatgcaagtctagcatcgcgtagggctcctcgtgagaatatttcatccctgatttggccatcacccgtccagaagctgggttgtcctgatcatgaacagcaatgagcttgttcatccctaactgttcaaaagccaaggcaatgactgccttggtagcctctgtcgcaagaccttggttccaatagtctttattcagaacatagccgatactccccttcttcagacaaagatccaaatccagtaaatcaatcgtcccgataaattttccattctctttgagctcgatcccccatcttccaagtgggctcgctaggtataagagggcaatattattacgcgtctcttctagactttgattggttgcaaaggtatagcgcgtaactgtctcatcagaagcatactcaaacatagccggtgcgtcttcaagagtgaccggacgcaagtgcaagcgctcagtctctatttctcgataagccgctaacttcacatataaattttccatttgactctccttctttagggattagtttagcaaataacataaaggaaggcaagctcaaatttttcttgctttttaacccacttttctatacaattaaatcaatcaaaacaatcagataaggagtgaaaaggtcattgagtcaagagagccatctcacaccaatggcctttttacacctaaatctgagcaaggaggcaagaatgctcattggaattcctaaagaaattaaaaacaacgaaaatcgggtcggtttgacacctgcaggcgtacaaagcttggtgaagaaaggtcatcacgttttggtggaaacaaatgccggacttggttctggctttgcggatgaagattacacgaagcaaggggcaaccatcgttgcgactgctgcagaagcttgggccgctgagatggtggtcaaagtcaaagaacccctcgctgaagaatatggcttccttcgcgaagacctcttgctcttcacatacttgcacatggctgctgctcctgaattagcagatgccatggttgcagccaagacaactggtgtagcctacgaaaccgttcgagacttagatggacaattgccactcttggtgccaatgagtgaggtggctggacggatggccgtgcaaatcggtgctcacttcctgaccaaacaagaaggtggatcaggagtcctcctaggtggggtgccaggtgttcccaaaggaaaagttaccatcatcggaggcggggtcgttggaacccacgcagctcgtatcgcccttggactcggtgcccaagtgaccatcttagatatcagtgctaaacgtttggctgttctggaagatgtctttggtcaccaaatccaaacccttatgtccaatccatttaacattgaagccagcgtccgtgatgccgatgttgtcatcggagctgtcttgattcctggggctaaagctcctaaattagtgacagacgatatggtcaaacaaatgcgtcccggttcagtcatcgtcgatgtggccgttgaccaaggtggtgttatcgaaacagcagaccgtgtcacaacgcatacggaaccagtttacgaaaaacatggcgtgctccactatgccgttgccaatatcccaggggctgtcgcacgtacctctactatcgcccttaccaatgtgacccttccttatgttgaatccctggctgacaatggcttccacaaggcaattgccctcgatgaaggcttgcgccaaggtgtcactacttaccaaggccatatcacaagccaacctgttgctactggtttagagcgcgacttcacaccaatcgatgaattggtttaatttctaacataaaaaaggcaaagatctgatgatctttgccttttcttttattcttcttcttccacatccgattcttctttgagcactgaatttgggatgggctcgtaggcccggataatttctgctactacaggatggcgaacaacatccttggcagagaaatgcacaaagtcgatctgagaaatatttttcaatttctcctgggcatcaatcaagccggatttgacatttcgaggaaggtcaatctggctagtatctccattgacaatcatcttagagttaaaaccaagacgggtcaaaaacatcttcatctgcatgatggtggtattttgcgcttcatcgaggatgacaaaggcatcgtccaaggtccgcccccgcatataagccaaaggcgcaatctcgataatctcccgctccatcatccgaattgtttggtctttccctaaaatctggtatagagcatcatagaccggtcgtagataagggtccactttttctttgagatcccctggtaggaaaccaaggctctctccagcttcaacagcaggacgagtcaaaatgatccgcttgacttgaccacgcttgagggcagtcacagccaaagtcactgctaggaaggttttcccagtccccgctggtccaatcccaaaagtaacatcatggttcttgacactatcgacatagatcttttgaccaagcgttttaacccgaatgggcttgccgtaactatccttgataatctcttcttcatagagagcgatgaacttatccaattcaccatttctcaccatggtaatggcggtcaccacatccggcgttccaatggtcatgccacggttaacgaggaccaaaagagcctggatgacttgacgaacctgctcgcagctttcttcttccccaatgatttggacgatttctgttcgggcatgaatagtcaccccaaattcttgctccatcaaacggagatggcgttcgttagatccaaacaaatgaaagagatcgtctggatgcgttaatgtaatttcaactgaatgttcttgcaaataaagaacctctctacctgtgtttttctattattataacaaagaggccgagaaaaaaccatcctcgacctatccttctctagtgggcttggtattcttcccaaatcgcatcaaaatcgccaagattaaaggaaaagctggcatgctcttctagatagcgactgacctcgtcgaagtcatctgtatgcttgggaaaagcagactcgtgaaatgcaagatctgctagaatggccttaggagcattgcttttaggattgcgctccgtcatcagccaagtataaaacgattttcgcataagcctcctcttagatcaactctgttccaaactggtcttgcttgatttttttggccttcatcaaaccacccaaagcctttttgaactgaccttttgaaatcccaaaagttgctttgatttcttctggagaggacttatcattcaaggtcataaagccaccattggcttccaaataggtcaaaatcatttgggcatcgttttccaacatttcaaaggaacgtggcttcaaagatagattcaaggtccggtccacctcacgaaaaccaataacgcgagcatttacgacctctcccaaacgaggttctgcatagcgctcacttgggtggataaagcccagcatattgttctctggaaggtaaacaaaagttccagacaatttcaagcggtagacaatggctggccagttttggttttgcatattgttataggctggacgagccaaacgctggaaatcttcctggtaggctaagatcccccaaatccgatctttcttatcgacttctaaacgaatatagagacgatcgccctttttaggccatagatctttgatctccggtaggatatctagtgagacaacaatctgcttatctggaagccctgtatccacgaagactcccaaatccttgcgcacttccgtgaccgttccccatccaaggctttcttgagttgctgtgacttcaagtgtcgtgagtcggagcttctgcttcatatctgtataggcaaagcccttgacactttctccgacttgatgggggccttctgctttatcaagcgcgtaggtttggccatctttttgaacaaaatagaagtgatcattttcatcaatgaccattcccatgatgtagcttgctagattcgtattcatgtttccttctttcctcttgcctcttcacaagaataatggaaataaaacccagccagcagtgccaactgagtctttctttcctataatggttgggatggattaaacttccatcaattctttttctttatgagctgtcatttcatctacatgcttaacagcgtcatccgtaactttttggatctctttttcaagacctttcaattcatcttctgtgatttcttttgctttttcttgtttcttcgcttcatccatagcatcacgacggatgttacggatcgctactttagcattttcacccacttttttcacttcttttgccaagtcacgacgagtttcttctgtcaaagctgggataaccaagcggataacagatccatcgttggctggagtgatgccaaggtcagaagcattgatgctgtgctcgatgtctttcaaagatgatttatcgaatggtgtgatcaacaagacacgcgcttctggaatggtgatagatgccaattggttcaatggtgtctctactccgtagtattctacgaaaatacgatccaaaagacttgcgtttgcacgtccagcacggatgctaccaaattcacgtcccaaactttggtgagactgggtcattctttcttttgctttttctacgattgggtttgccataatcttcctctattttctattatttttctacgttattcgatacggttgtaccgatattttcaccaaagacaacgcgtttgatattgcctggttcattcatattaaagacaaccaagtcaatgtcgttgtccatggagagagtagaggctgttgagtccatgatacgaagacctttgttgatcacatcacggtgagtcaattcctcaaatttcacagctgaagcatcttttttcggatcggcattgtaaacaccatcgaccccatttttggccatgagaatggcatctgcttcaatctcagctgcacgaagggctgcagttgtatctgttgagaagtaaggagaaccgatccctgcaccaaagatcacgatccgatctttttcaaggtgacgaagggcacgaccacggatatatggttctgcaacttgttgcatggcaatcgctgtttgaacacgtgtatccacgccaacttgttgaagcgaatcagccatcacaagagcgttcatgacagtaccgagcatacctgtgtagtctgcttggacacgatccatccctgcttcagcagcaggttctccacgccaaaggtttccccctccaatcaccaaggcaatttcaattccaagttcatgaacttccttgatttcttgggccatattttggacagttttgatatcgattccgacaccacgttcgccggcaagagcctcaccagatagcttgattaagatacgtttatacttaggttctaccattttctctctccttttttgatctgtattattttaccataaattacgctttttatatagtcatatccatcaaaattttcttttttccatccgattagttttaccaactgtagcaaataaaaattgagtacaaaaaaagctacccgaaggcagcttttcatttcaattaaagtgagttaacatccactttgataccaggaccttgagttgtagtcaaagtcaagctagttacgtaagtacctttagctgtagctggttttgctttttggattgtgtcgttgaaagctttaaagttttcaaccaatttagtatcatcgaatgaaactttaccgatgatcgcttgaacgatacctgctttatcagcacggtaagtgattttaccacctttagactcttcaactgctttcgcaacatccattgttactgtaccagttttagggtttggcatcaagttacgtggtccaaggacacgtccaagacgtccaacaagagccatcatatcaggtgtagcgataacaacgtcgaagtccaaccaaccatcgttgattttcgcaacaaggtcatcttcacctacgaagtctgcaccagcagcttttgcttcttcagcttttgcaccacgtgcaaatacaagtacgcgagctgttttaccagttccgtttggcaataccattgcaccacggatttgttggtcagcttttttcacgtcgatgttcaagttgtaagcaacttctacagttgcgtcaaattttgcaaagttagtttcttttgcaagagctacagcttcttctacgctgtatacttttgtgctgtcgattttttcaagagcagcacgaagttgtttgctttttttagccattttatctttctccttgtaatgtggtcatatcgattttcatctcccacgtcactcgtcatttgatcaagtgtattgcgggcaaataggattgttacaattagtcagtaacagtgaatcccatagaacgagcagtaccttcgatcatacgcattgcagactcaatgtttgcagcgttcaaatctggcatcttagtttcagcgatttgttgtacttgtgcacgagttacagttgcaactttcgttttgttcggtgtacctgaacctttttcaacacctgcagcttttttcaaaagaacagcagctggtggtgtttttgtaacgaaatcgaatgatttgtcttcataaacagtgataacaactgggatgatcataccagcttgatcagctgtacgagcgttaaactctttagtgaatcccatgatgttgatacctgcttgaccaagcgctggaccaaccggtggagctggagtagctttaccagcagggatttgcaattttacaagtttttcgacttttttagccatttcttaaatcctcctttgtggttttggcggtaattacagatttttacctcccacaagtatgctttgtgcatacctttctattatacacgatttctctttttttgcaagaaaaaattaaaatatagtaaacttttttttcgttttatgatagaatgaagctatgttaatcaaagttgcttctgtattatttatttttttaacgctgattctgagcggcatcattgttcacctctttaaactccaaaaaagaggatggcgatctaccgatattgcctttcctttatttgcattggagtactacctgatctcagacagtgccttttaccacagcctcttaccactgctagccttgagcctttcgcttttggccttggggctaacgatttatttcttaaaaaagaaaaagagtttttattatcctaaatttatcaaatacttctggcgcgctggatttctggtcaccttcttgctctatctgatcttaaccgctagtttgtttatctaataccaaaagacaactctatctttggagttgttttttttataaataacctagatgatactgcattgcctgaaatcattttaagtttaaattctccaaatatttactgaaactttccgacgtgagaaaagtgctagaaacacgattgtttctagcactcgggagttttgaaactttaggttcaaaactaagtcatggaacttcgtggaagttcgctgacgtccgtactcacctaaggaaagtttccaaattatctttttcttcaatttgagacaactctatctttagagttgtctttttttatttcttccgatgaaagaaccagcccaccaacttcttgaaaacttgaatcaagatgagagcaagaaccgccatgatggcacaaataaccagtgtttggatcctcaaggggctcatgttaaagaatctccctaagatactacttgaaaccaggaaggctaggatatttcctagaagaaccagtctcttgtagtgattgagaggctgggattcttgatagatgatggtaaagccaacgaaggccatcaagcagatggctgcactcgagagttcttctgacctcatgccaaatgttgaagagagcaataccagactgaagatcagtataaaatccgtcaaggcagcaggtagcgcatttttaaagaccgtttcgataaagcgccctttgatgcgctcgctattgggctcaagcgctaggaagaatcctggaatcccaatcgtaaaaccactgatcaaagacatctgcgatggcatgatgggataagtaaaggctaagagcgtcactgagatagccaacaaaatagaaaagatattcttgatcaaaaagagactggctgatcgttgaatattattgaccactcgccgaccttctgccacgatagacggcatcttcccaaagtcagaatccagtaagaccacttgcgccatctttttggtcgcatcatttccagattccatcgcaatactacaatccgctgttttgagagccagaatatcgttgacgccatctccggtcatggcgactttatgcccctttacctgcaagccttctacaaggcttttcttctgctctggtgtcacccgaccaaagaccgtatattggctcgccgcctggtgcaagtcttcttccgtcagtaaggttctggcatcgattagaccctctgctccttcaatgcctgctttttgtgcaatagctgagactgttgctgggttgtcccctgaaatgaccttaatggtcaccccttgttgtttgaagtaggcgaaggtttctttggcattttttctcaaaggattggagagaataatccaggccaccaagtctacaggagcctctaaagtctctcccaggtgttctcctcgatatttcccaaaagccaagacccgattgcctgcctgagtagcaggagctatctcctcttcaacctcagagaagccctctcgtaagacaaattctggtgcgcctaatacatagatcccagattcaaaggcaatggctccatactttttcttagacgtaaagggctgaatgtctttagccttccaaggctggctgactggtgtcttatgaaattttcggatggcatccatggtatcgttttgatccatactagccttgacatactgagctagagcttccaagtcttgagcatctttaactggacgaatctctgtaacttccatacccggctctgtaatggtccctgtcttatcgacacaaagggtatccacgcgcgataaggtctcaatccccttcatgctattgagcaggaccttttccttggctaatctgacagcacccagagccagtgccaaggtcatcaagagatacaagccttctggaatcattccgatcaaggccccgactgttgaagtcacactgagcttgagactatcgcctaggctgatatagctgcgaagaaaaaggagcgaacctagcggaatgataagaagaccaatgatccccacgattcgattgaccgcatgaaccatgtcagactcctcatgagacttgacctgcttggcttccaggctcagttggttgatgtaggagtcattcccaactttttccaatcgcgctaaaccttgaccagcgatcacaaagctacctgacatgagcgcatcttgtgctccttttttgacctcatcggcttcacctgtcaattgagactcatcgacttttagctcgccctccagcaagaccccatccgcatagatctgatctccagcttgaaagcgaaccagatcgtcctccaccagctgatcgataggtagagcgacttcttttccttctcgaagaacgatcgcctcactcatatgtagaaattgcatctgacgcaagatccgtcgagaacggacttcctgcacaattcctaccaaggagttgaccacgacaatcgggacaaacaagagattgttccaagacttcactgctaccagcaaaatagccaaaattaaaaatatcagattaaagtaggtaaagacattgtctcgaatgatctgtcctaggcttttttctgtcttgattgtgaccttattttgcttgccctcttggatctttttcgctacttcttcctgactgagtccttctaatctaaccattgctttcctcactcatgtatttccaagggcaatccttctggatcgaagaaaaatgccatcttcttgccatcaaaatcatcatagcgaaggcctgtattctctatacctagctgatccaatctggctagataggtctctacatcgtccactttaaaggccagatgacgcagtcccgcatgctcgggcaaggggagcttaggccgttctggggcagtcggtttgataaagagttctaaagtcagctgaccctgacggagattgatcaagatatctccgcgttcgggacggtcatactcactgacaatcgcaaagcccaactggtccacataaaaatgcagcatagcgtcgcgatcccgtccaatgatggcaatatgatgaatcgtgtctaacttcatctggtcctactttctattttctataaaaagaaaagggagtgggacatatgccctttttccctatccttatgattgttgcaatacttttcgaggcttggttccttcagctggtccaatcacacccgctgcttccaactcttccatgaggcgagtcgctcggttaaaaccaaccgataaacggcgctggatcatcgaagcactggctttttgggtctcgatgacgagtgccttggcctcttcaaagagaggatcaccctcgtcggagctacccatgcctccatcaaagtctgactcggatacttcgcctggatcaaaggcatcatcataatcggcttctgcctgctctttgacaaagttgacaatccgctccacatcgtcatctgagataaaggatccttgtagacggattgggtggttttcatcgatcggtttaaagagcatgtccccacgaccgagcagtttctctgcgccattttcatccaagatggtccgtgagtcggttccagatgataccgcaaaagcgacacgtgaaggcacattggccttaatcaaacctgagataacgtcaaccgatggccgctgagtcgcaaggatcatgtggatccccgccgcacgcgccttttgtccaaggcggataatggcatcttccacttctttacttgcgaccatcatcaagtctgccaactcatcgacaatgaccacgatcaatggaaggggtacttgcttcatctcagactgggcattgtactcagccaccttggcattaaagccagcaatattgcgagcacccactttcgagaagagctcatagcgattttccatctcatcaacgaccttctgcagagctcgactggccttgcgtgggttggtcaccactggaatcaagaggtgaggaatatcattgtagacagaaagctccaccatctttggatcgaccatcataaacttgacttcgtccggacgggccttcatcaagatactcgaaataatcccattaaccgctactgacttaccagatccagtagaacccgctaccaagaggtggggcatccgagccaaatcaaaggtccgagctgaaccatctacggccttcccaagaggaatctcaaggagtttagctgggtctgtcttggactgctcccacaattcacggaaggaaacggtcgcaatctctgagttgggcacttcaatcccgaccagagacttccctggaatcggtgcttcaatccgcacatccttggctgctagggccaaagccaaatcatctgctagattggagatacggttgacccgcacaccgacagccggcttgacttcatatttggtaacagaaggaccgatttccgcccgctccactgtcgccttgatattgaaacttgcaaaggtttcttccaaaatgcggatattctgacgaacgatgtttttctctttggattgatttttcggcttatcaggtgcgaagagatcaatggttggaagcttgtactggaggagttccttaggtgtgaaatccacttgaacttcttccccatcgtcctcgaattcttcggcttccggaaactcttcgtatgcttcaggctcttcaggccattcttgatctggcaggtaaatctctggtgttgctggtgcgacaatttcggcttctgggaagggctctgtgaacggctcttccgccaacacctctcccgtttcagggtctacaggatgcccttccattgaaaggggagtttgaaaaactgcacttgcttcttcttgctttctttcagctgcagcagcttcctcggcagctctcgcttctttttcaaggaatttctgctcgcgacgctctttgcgtttctccatagaagcgtggaaggcttccgatcccttttcaaacaaatcatagatggagtaaggactcatcaagagaatccccaatccaataaagagaaggccaataaaataagaaccaatatttgaaaacaggaaggaaatcggagcataaagaagggcaccgatcataccaccaccggcaaagctctccactcgcagatgaatcaggtctgccatgattcttgaaaaggtgaccttgatcccattattgtctaaatgaagggaggatacaaagaaggcctgaaacatcaagagaagcccagcaaagaagcttaggaatcctgaaatcaccccttcgtgtttgtccagccatttaaaggcatagaggtagaaaaaggtcgctaaaatagccaagtaagccaaactcccaacaaagagtcggatcaagttgtaggccaagacccctactgctcccaatttcaaggtcgcaaaaactaaaaccagactaatcagaatggtcacaatcatgcgatgaatcgctttttttctttctaattctgctttggacagtcgtctcgtcgaccgtgttttttttgattgattattgtttgccataacctttattatatcacatttccaagccagttctctagtaaaatcactttcacaaatttgtagcagaaagcagaaaaacagcaccgagtgggcactgttctttagagctgtttagaacgatattcaatgatgttcaaattccaaaatggatcttattcagattttttatcctccggtgtgatggtatctagaacttgatcgaccttttgctctctttccaattcgttatccatttgaattatatcgatttgatcttgtacatttgtctgctggacttgtggtttgaatgacgaagcaaatcctactccaatcaccaatagacccgctccaagaacgcaaagtcttttaacatgccaagccatcggcaagggaatcttcgctcggatccccgatttcttgacccaatccggatggtctcgcatcacacgatttgctgccatcagaggcatcaggtagccaaagagcgcaatgaccgtggtcaaaccaataactcgaaaacgattctgattggaaggagaaacatggttcacttccatcaagaccattcccacaatcactaaaataatgactagtaatagtcccaaagatctccatagaccttccctgcggtaacatttcaattcatcaaacgacatctcgttaaaattcttattcattttttaataattccttgtgtttgttcaggctctttcaattaatctctattttgattggaggatttacagatgactgccttcatccttcaagtattgcttagcctttcgaacgatatagagcaactcatcttctgagactaacttgcgaaagagatcattggctctgtgctgatcgcctttaagagtagcattcaaggcttggtagtagataatttccaactgctggtacttgaaatcattgcttaaatcttcgaaatagtcattactttggtgcgcaatggttaaatcataaagggcaagacagacctttcttgttttctcagccagtgtcgggtctgtgatagtcaattcattcaacctaccctccagttctcctctagacaaatcaggatctgtcaggacagttgatcgcatgagataactttcaaaaaagtttttatatttctgcggataatccgtccgactaagtgcttccctagcttcttttatgacagtatcaaaatctcccatcataaaagaataggcaaccgatgtcagcttaatatctatctgtgaaatagcttttttcacattcttgttcaactgaaggtattgctgccaaaaagctaaatctaagtctacacggagcaaggtgttgcacttgttggtgtagcttttcttgagcaattggatgaataaaatcaagcatgcaataaccaataaaacgccagcagtctgaagaagattatccctgaccactaatccaatgcaaaagatcagaagcattgctaacaagcctgcagatctaatatagagtctatagtttttgcgtagagttttataatccaatttgtagcctcctattcatgatacggtttttgagggaattcgttcattttcaaacaaattaacatatctcccatcataccgaattttccatctatacgcaacttccttcttaattagtgatttatcaaatgttatcggtcttgaaacaacctcagaaaatagagaatcccgtccagatttgaaagtatcgcaaaattaaggtacaatagaaaaagacaactatgttggaaaggaagaatatgaaaaaattaatcgcactactattattttccggcttggctttgacagcttgttcgtctaataagactgacgctaactcttcaagctcaagcaaagaaaagacagagcagacagcaacttctagctctagtgaaaaagatcaaaagaaaattgaagaagaacaaaaaaaattagaacaactgcgcaaagattttaacgatgccatgaccaatgaaaatgctgtcttcccacaactctcaactgatgtggctgaagacgaagcagaggttaaaatcacgacaactgaaggcgacatcactgtgaagctcttccctaaatatgcgccccttgcagttgaaaacttcttgacccacgcaaaagaaggctactacaatggcttactcttccaccgtgttattaacaactttatgatccaaactggggatcctaagggagacggtacgggtggcgagtccatctggaagggcaaagacaaatccaaagattcaggtactggttttgagaatgagtattctccatacctttacaaccttcgtggagcccttgccatggccaattctggtccaaataccaatggtagtcaattctatatcaaccaaaataaggatgatatttctagcaagctcccgactgaccgcttcccagctaagatcatcgatgcttataaaaatggtggaaatccaacccttgatggtggcaactacactgtctttggacaagtcatcgatggcatggatgtggtcgataaaattgcgtctgccgaaactgatgataaggacaaaccaaaaatagacatcaagattgaaaaaatcgagatcttaaaagactataatttcaagaaataatgaaaagagaaccaaacggttctctttttctatcaaatgtaaatttttcttagaaactttccttaggtgagtacggacgtcagcgaacttctgcgaagttccatgactaattattgagcctaaggtctcaataattccgtgtgcctgaaacaaatctgtttcaggcacttttctcactgcggaatgtttcggtcattacttgactaaatttaaaaatagaatcatttagattttttgaattagttatgccgctttatgtaaacaacaaaatttcttcattctaaaaagcgagacaagtttctctctttgtctttacgtcaattcattaaagtcccagatttgatccatccagccttcatagaagtctggctcgtggcaaaccatgagaatcgatcccttgtactctttcagagcccgtttcaattcatctttggcatccacatccaagtggttggttggttcgtctagtaccaagacattgttttcacggttcatcaagagacagaagcgtaccttagcttgctccccaccggataacacctggatttggctctcgatgtgtttggtcgtcaagccacagcgggcaagggcggcacggacttctgcttggttgagagccggaaaggcattccagactgcttctagtggtgtttgacgattgccaccttcgacctcttgctcgaagtaaccaagctctaggtaatctccacgctcgacttctccagcgattggtgggatgattcccagcaagctcttcaagagagtggttttcccgatcccgttggctccgatgatggctaccttttgattgcgttcaaacgttaggttcaaaggcttggtcaaaggacgatcatagccaatctgaagatccttagcctggaagataaagcgtccaggagtccgagcatttttaaattcaaaggatggctttggtttctcgctttgcaactcaatgagttccatcttgtccagcttcttctgacgagacatggccatattccgtgtagccacacgcgccttattgcgggctacgaaatctttcaaatcagcaatctctttttgctggcgctcataagccgcttccaattgcgatttcttcatttcatagacttcaaggaattggtagtagtctccggaatagcgggttaactgctgattttccacatggtagacgatattgatcacatcgttcaagaatggaatgtcgtgggaaatgaggacaaaggcattttcatagttctgcaagtagcgtttgagccaatcgatgtgctctgcatccaagtagttggttggctcatccaagagaaggatatctggtttttcaaggagcaatttagccaaaaggaccttggtccgctgcccacctgaaagggccgtcacatccgtctccatgccaaagtccatgaccccaagagcccgggctacttcatcaatcttggcatccaaggtataaaaatcacggctttctagacgctcttgaagttctcctacttcttccatcagagcatcgacatcggctccctcttccgccatggccatatagaggtcattgatgcgagcttcagctgtgaacaactcatcaaaagcggtccgtaagacatcgcgaaccgtttgtccttcttctaagaccgaatgctgatccaggtaacctgccgtcacatacttagaccactccacctttccttcgtcaggttgcattttaccagtcacaatgctcatgaaggtcgatttcccttcaccattggccccgacaagaccgatatgctctccctttagcaaacggaaggacacatcctcaaaaatcgcacgatccccaaaaccgtgactcaaatttttcacttctaaaatactcatgcttgactctctttcattgatttcactcgtatgattatatcatcttcactacaaaatgaaaagggagcccaactcccttttcttttacaaacccaagtctgcgtaaggtttccggtagccaacttgaacaacttttccgtctttgacaagcagaggccgcttgattagcataccgtctgaagcaaggagatccgccgcttctttcactgtcagttgatccaccttatctttcaaaccgagttcccggtatttcattccgctagtattaaagaaagacttgatcggtaggccagacgctgccatccagtcttgcaattctttgctagtaggtgtttctgtgacaatattttggctttgaaagtcacattggagaccgtccaattctgatttagcctttcgacaagtcgaacattttgggtattcaataaaggtatacatcgattttatttctccttccaggtaattccttcatggtgtaagagccagcgtttgcgatcgagtccagacgcatagcccgtcagttgtccatcttttcccatcacacggtggcaaggaactaagatcgtcaagggattgcgtccgacagcctgtcccacggcttgggctgaaccacaagaaagatcctgggcaagctggccataggttttggtctcaccatatgggatctctcgcaataactgccacacccgctcttgaaaagctgtcccttgcggtgctagtggaaagctgatagcgattggatctcccgcaaaatagtggtccaaccactccttcaccttctcatggtagggatggacctgctccagcgccccatagagatcaggcgcatcttctttcggatcataaaaatcaagctctacaaggccttcttcactgacaacgatcgaaagaagccccatagggctttcataaaattgtttaagatagagagtcattgtaggctgcttccgctctttggtcccagcggtcctcttctgagaccacttggaatagactagtttctgcttttcgtttgatcttttgataagccagacgaactccatcaatagggacctttccacaataatggtagcccaatttttcaagcaaatgttgcatgactagattatctgggtgcgtatcgcaacggaaatccggtcctttttccccttcgattaaaccttgaaggaaggtctgagccacccctttgccagcagcttctttggctacagcgacgcggtgaaaagtgacatacatatagttgtcatgctcccacttgccatcgtaaatctcattataggccgcttcatttcccttgtggacggctgcataggcgacaacttcctgatcttcaactgccacatagccacgactttctagaatatcctcaaaaataatctcttcatctggatagccatcctgccactggtcaacctgtctttgagccaggctttccttggcgtcttggatgatttccataattcgcttaatctcgttgggataagccattctaatttccatcctgctttcaacctttcctagtcttgatggtaacgagcatagagctcactcttttgcaggccgtattgttttgcgacctgtttaattgcttgatttttcttcatgccctcttggaccaaggtatcgatctcttggatcaagtcgacctcttctaggtctagctcttcttccttggctccttcgacgatcaagaggcactcccctttgagaggattttcttcaagaaatgcgactaactcagaaatactgccgcgagtatattcctcgtagatcttggttaattcacgaaccaggacgaccgaacgatccccatagacagccaacatattctctaaggttgccttcacccgatgaggcgactcataaaagatctgagtctctggataggccactttttcttggaaaaaggccttctgttgcccctcttttcgaggcagaaatccataaaaaatatgaggttgaggggctaggccactggcaatcaaacccgttataccggcactagggccaggcacagctacgacaggaatctctcgttcaatcgctgccttgaccaaatcatgaccggggtcagagatactagggagtcctgcatctgagacttgcgctaagtcttttccagattctaaatgggcgatcagatctggaattttttccatggcattgtgctcatgaaagctagtctggggcgtcgcaatctcaaaatgcttgagcaagaggcctgtatttctagtgtcctcagctgcgatcaagtccacatcctttaaggtctggaccatgcggtaactcatatcctcacggttaccgatcggtgttgggaccaggtaaagcaccccagttttcttttcctctttaaaacttcgttggatctgcatgcttactccctaaataacaactcgtcacaaaacatacactcttcatcgttctcacggcgttgaccgtaggaataagtgcaaatatgaaaaccatcattgtaaatacgttgcaaattttcacggccatggtgttgtgactttgtggaggaggtcttctcaacttcccccaaacgctctctcaatttatcattttctaagcgaagagctgtattttcttcgatgacttgtttcaaatttttcttgatggcttcgacttcagccaaggtgaccaacaaattctgagaaaagccgtctaaagcatcaaataattcttttttattcattctgactccttaactttctaagctcaaaaccatatattctagagcattttgaaaagaaacattggccttccacatcctgcgagcaagactcaattttcccagtagctgctgggatctgttcaagcgcaactgctcttctaaagccaactccatcaaacgaaaggcctggctttgtttttccttatcatctgctaggctcactaagcgggtcacttccaaataggcacgattcaaattggattgacaacgttcgatgaactgatcacaaattttggccagttcaaaaaacgtagcattctttttttgttgctctgcttcttcgagactaaaactaaaacgagctactaaatttgcctgtgatttaatcaagccttctttttctagcagttcggttaggtaggcttgctttttaggaaaatggacctgctgggcccgacttttgatggtcggtaagatcaagttttcatcggatgtcaacaagaagagatagatctcactctggggttcttccatgacttttaagagagagttggccgcattggtatgcatcttatccgcatcttggacgataaagacctggcgactgccttcaaatcctgattgagaaaagtcttgaacgagcgagcgaatacggtcagtcttaatgatctggttgactggacgcacgatctttacgtctgagaattcttcttcttcaatcaagcggcaggaacggcatttgccacaaggccagactccctgcaagtcttcgcaaaattgactttgagctagcaagagggccatctcaaaactggcaaaagagcctgtaaaaagataagcatgactgagctgtttgtgttctaagatctgggtgaagcgctccaccaattctggctgaagctgttggatctcttctagcttcatttcaatatccccaagcgattttctaaaacagccaagacatccgcaaagactgcttcaaaggattgactggcatcgattttcacaatgcgctctggctccttttcatacaaggccaaataaccttgtctgactttttggtgaagctccaaaccttccaaatccaaacgattgacttcccgctcttggtttttcgcaattcgggcgagcccttcttcgacatccagatcaaagtaaagggtgagatctggtttaagaccatctgtcgcgaattgattgagccactcgatatcttccacactcagaccgcgaccatacccttgataagcgaccgagctatcaataaagcggtccatcaagacaaccttcccagctgcaagggctggcaagacacgttccaccaaatgctggcgacgactagcaatatagagcaacaactcggtcttggcatccatactagtatggtctggatctaaaatgacttggcggatcttttctgcaatgtctacaccgcctggttcacgggttgtaataaaaggaattcctttttcttcaagtagaggcaaaacggcttctaggaccgatgatttccccgctccttctggaccttcaaatgaaattaatgtaccgtttaccatagtatcctctttctagttttctactttttattttaccaaaaataagggtaaaaatcttgtattttaggagagaaaatttttcaaagtcattttcattttttcacttttttgttacaatgttcttataaagttttaggagacaacctatcatgtttaaatttaaagatattctggctatcatcttgggggccggcattttttcgtttgggatctattttttagtcattccctttcacttctatgaaggaggagcgacagggattaccttgatcacctattacctcctcaaaatccctgtatccctgatgaacttgctgatcaatatccctcttttcattctggcttggaaactgctgggcaagaaatctctttatctgagcttacttgggactttctcggtttcggcatggatggcaatttttgaagctatgcccctcagccaccactaccatcactttatttttacagcctttaaaggagatattctgcttgcctgtatcgcctcaggggttgtgcttggtttaggtctagggatcatcttcaatgctggaggaactactggaggaacagatatcctcgctcgaatctttaacaaatacacttccctcagtatggggaagctcatgttgattgtagatgccattgttctgacaactgtggtcattgtcttccaagatgtccgtaccgctatgtacaccctcttctttatcctgattgacacccttgtgatcgacttgattggagaaggtggttttgctggaaaaggcttccttatcgtcacatctaaaccagaagaaattgcccaaaaagtatccgacgatctgggtcgcgggattacctttatccgcgggatgggctattacagccgtaaggacctggatatcgtctactgtgtcgtttcacggaatgagatgaaacaaatgaaagacatcatcaatcagattgatccatttgcctttatcactatttctgaagcccatgaaattctcggcgaaggcttcactttagataaagaaaaacaacccattaaccgttaatagaaataaggctagattttcatctagctttttttctatttacgattttccttaggtgagtacggatgtcagcgaacttttacaaagttccatgactaaatcaagatacaatccgcgacccgtattcaattagttttgagccccttcgctttttaatttctaagctcaggctaaaacagttccccaaactgttttactctcaaaaattccgagagcatgaaacaagtatgtttcatgctcctttctcacggcggaaaatcttagaatacacgtcataattaataaaatcataattatttttacagaatttattaagttactttatacaaaaatcagactggattgtcatccagcctgatttttttattaaatagcttttgcggttgttcgagtgatttcatcaactttcaaaccgttggcttcaaatttactacggattgtttctagatctgtcaccccatcaatttggacttcgataaccacacgatcgtctttggttgggatattgactgtattggcgatgttatacccctcttctacaatcaagtgaatgatttgttctagaacgccaaccttatcttctgtcacaaagcgaacacgaactccttcttctccatagcccgatacttcaaggaaggcacggaaaatatcacggtctgtgatgacaccagatacttggtcattgtccacgactggaagaattcccaccttgttcttatacatgaggtaggtcgcatcttctaagctcgcaaatttagagacggtaatgacatcgcgaagcatgacatctttgaccttggtcttgttcaacagatagttcatctcgaaaattgacaaacttgttgctttagatggacttgcttctgcaatcgtaccttctgtcactaaaccaaccaatttatcattttcaatgactggcaaacggtgcaaaccttgttcgcgcatcaaatctgccgcatgggcaattgtagtatctggactaatgtaaaccactttacgtgtcataaaatctttaacagccataacaagttctcctatgcttttattagttttattatacttgattttaagaatgatttcaaacgctttcagctgttttctcttgttttcaaaatttagaaaaatcaaacaagagggatgaaaaaagaaaggtcttcaagacctttctttttaatattctagtgaactttagaaatcttacccacccaaataagccttgcggacttcttctgaagctaagagttcttttcctgttccggtaagaacgactttccctgtttccaaaacataaccgcggtctgcgatggcaagggccttgttggcattttgctcgatcaagagaacagttgtcccttgtttttggatatcttggatgatatcaaagatttcttggataaagattggggctaatcccatagaaggttcatccagaagcaagagttttggcgtcgacataagtgcacgacccattgcaagcatttgttgttccccaccagatagggttgctgcatcttggttcttccgttcttccaaacgcgggaaacgagaaaagactttcttcaagttagcttgattttcttctcgatcttttttcaagaaagctcccatttccaagttttccataacagtcaagcccggaaagacatgacggccttctggaacttgagagagtcctgctgctacaatcttttgagccggaaccttttgaatctcctgacctaaaaactcgattttcccagcacttggacgcaccaaacctgaaatggtacgaagaatagatgttttcccagcaccgttagcaccgataagagaaacaacttccccttcgtttacctcgaaactgacatcacggacagcctggatcatgccatagtgtacagaaagattttcaacttttaacatagacattaggcttcacctcctagataggcttcgattacacgtttgttggtcttgatttcatctggcgtaccatgggcaatcaagcgaccatattccaatacataaatccgttccgttacttccatgaccaaactcatatcgtgctcgatcagcatgatcgtaatattaaattctttttgaatgcgacggatcaattgggtcaattctgctgtttcttgagggttcatccctgcagcaggttcatccaagaagaggatttttggctctgtagcaagggcacgaacgatctccaagtgacgttgttgtccgtaagctaagtttttggccaaggtatctgcttcgttttccaaaccaaaaatcgctaacaattcaagagctttcgctttcaaagcttcttcattcttgtaatagcttggcaagcggaaaagactcgcaaagacatgtggtttgtggtgattggcaaaggcaatcaagacattatccaaaacgctcaaatctttaaagagacgaatattttggaaagtccgtcccaaaccacctgcagcgattttataaggtgctttaccatttaggagctgaccgtctaaggtaatggtcccttcacttggttcatatacccctgttaggaggttgaagagggttgttttaccagcaccgttgggtccgatcaacccaaccaattccccttcattgagttccatggtcacatccccaacggctgtcaaaccaccaaagttttttgttaaattttttacttcaagaagtgccattagttagcctccttttttgagagtagttttttcaagctgaattcccatgttccaagaagaccacctggacggaagatcatcacgagaatcaaagccaatgagtaaatgatcatacgtacacttgagaagtcttgaagtaccatgttcaagatacccaagacgatggctgccacaactgttcctgacattgatcccaaaccaccaaacacgacaatgatcaagacattaatggtattggtgaaagagtaatctttaggaacaacagagccgataaagccggcttggagagatccagcaatcgccgctgtgatcgcgccaaatacaaaggcgatgactttgactttggtcgtattgatcccaacagattctgctgcgatttcatcttcacgaacagaaagggtagagcgtccaattggactgcgtaagaagttaatcgtaaagatcgttgtaatgacaacaaagaggtaaaccagttgccaagttgtaaaggctggcaaaccaaggataccagcagcaccatttgttagggtaccaccattgacgatcaagatccggatgatttcagaaaccccaagtgtcgcaatcgcgaggtaatcccctttcaaacgaagggttggaaccccaacgatcaaggcaacgacaccagcaatcaaagcacctaaaaccatcgcaccaaagaaagccccataggttggtgatttggaaccgagaatggctgcagagtaggcaccaatcgccataaatccggcatgcccgagtgagaattgacctgagaaaccaacgatgaggttcaagccaactgcaaggataatattaattccgatttgttctaaaatttggatatagaagaggttgagcacacccgctgcaaccaagacttggatcaaggcaaaacctgcgaccaaaagaccaagccagactaaattcacttttaaattttgtttcatggcttacaccttctctttcacatttttaccgaggatacctgctggacggatgagcaagatcacaatcaagatggcatacacaatggcatcacggaagtctgaaagaccgatcgctgtagcgaaagtttccaacaaaccgataacaaatccacctagggcagcgcctggaatgattccgattcctccaagaacggctgcgacaaaggctttgatccctggtgtcatccccatcaaaggctcgatcgagttgtaatacaaaccaatcaagacaccaccagcacctgccaaggctgatcccaaagcaaaggtaaagctgatcgtacggtttacgttgatccccatcaattgagcggcatcactatcgacagatacagcccgcatggctttccccatctttgtcttttgaataataaattgaagagcgaccatcaagaaaacagacactcccaagatcatcaactgaatattggagattgaaataggaccgaagttgtaacgaaccgttttaatcacttgcgggaaggaacgggtattggcccctacgaagaagaccatcccatattcgagcaagaaggaaaccccgatggctgtgatcaaggctgcaatccgagtcgaatgacgaagcggacgataagccaggtattcaattacaacccctaaaatagccgtcccaaccatggctaggagcaaggctacaaagaagttcactttccatgagttcaataagaaatatcccataaaggcacctaccatgtagatatccccatgggcaaagttgatcaatttgataattccatacaccatggtataaccaagggccaagagtgcatagacacttcccaagattagaccgttcactaattgctggagcatttgaaccatcctttctaacaataaagagcgaggccaggaattttcattctcccagcctcttgtacaaacaacaaatgataattatggtttaacagactcaacagatttgactttaccatctttcaagccaatcataagagctgatttaaccgggttgtggttcttgtcaattgacattgtaccagtcacaccttccaagtctttcaacttcgcaaggttatctttcaattcgacagagttcttagcacctttagatgcttctgcaaccatgtaaactgaatcataagccaaagctgcgaacattgaaggttcttcattgtatttcgctttgtaggcttctacgaatttcttggctttatcagtcatttcaccttcagtagagaatccagctacgtagtagatatctgtagctgcagcaggtgttgcttgttcaacaaatttagcatcgctaaatccatccccaccaatgattggttgtttgattcccataccacgcgcttggtttacgatcttaccagtttctgtgtagtaacctggaagaacaatcgcatcgaagtctttatctttgatttttgtaagagcagcttggaagtctgtatccttagattggaaggtttcagttgctacgatttcacctttataagatttcttgaaggcttcagcaatccctttcgcatagtcagatgagttatcgtagtaaagaacgactttcttcgctttcaagttatcagttgtgtatttggcaatgatttttccttggaagctatcgatgaaggttgcacggaaaaggtaatcttgaccttttgtcaaatcatcttgagttgctgatggtgtaaccaatggcacacctgctttaccagcattggcaaccgctgctgcagtagcccctgaagttgcaggtcctacaagagcgttcacttttgattgagtgacaaggtttgtagtgactgtagctgcttcagctgtttcagatttgttatctttatctgtgacaacgatcttcttaccgtcagctccacccttagcgttgatttcatcaacggccaattgagcacctttttgttcagcactaccgtaggctgctacttcaccagttttttcaaagttaaaaccgacttttagttccttgccgatttcgttaccagttgtgtttgaacctgaagtagaaacttcaccacaagcagcaagaagagcgacacttgcaatggttaaaaatgaaagagcaaattttttcttcatttgtaatgatctccttaaatgaatcttaaaataaatacattaagaatataccgaattatctgacaattgtcaataaaaaaaacgcaatccatcaaatgattgcgttttctaaccttctgtgaccacagatggggcctccaatcgttgcaaactccccacaaaatctgtatctaaatctttgagatggcaaggcaagacctttttgacataacgttctttctttaagtcttccatgacttgatcggccttgtcactgtccacatacaattggacataacggcatttcttagaatggtacaagacatctccgacagattgtaattttttcccatctcgattgtaatacaatttaacaattaagcctgttctttcttgtttctcaaacatggtcaatccctttctcgttctgttactagtatatcaaatttcaagaaaaagaactactcttttatgagagcaaaaaaagagagtgggacagaaatcggtcattcgttagaattcgatttcgtcgtcccacctccgcacagttgagtagggctgtaaaagctgatgaaatcagcgtagtagagcccactcaaccactgcgttttgctcgacaatccaaaaataattgagaggctaggacttttgtcccagcctcttgacggaccttcccataggatggtttagtccaatttattattggccatgatttcatcaataaagccatattcaagcgtttcttgtgcactcatccaattatctcgctccgcatcagcatgcactttttcaatggattgacctgaattttccgcaaggattttttccaagttattccgtgttttgagcaagtgttctgctgcaatcgccatatcggtttgttgggtaccaccaccagtaccacccattggttggtgaatcatatactcagcgtttggcaacatgaagcgtttgcccttcgcaccgcttgaagcgatgatagttcccatagaagcggccatccccatgacaatagtttggacatctgacttgataaagttcatggtatctacgatggcaagacctgcagagacagagcctcctggtgtattgatatacatatagatatcttttgtattatcttgggcatccaagaagagcaattgagcgataatggagttagccatttggtcctcaactggtcctgttaccatgataattcgatctttcaacagacgggaataaatatcgtaagaacgttctccacgactggtttgttcaataactactggaatcatctattcttctcctttagtatccattcattctcacgattcgtgaggttcaaagtatatgtgctattataaaccaatggtcaaaaaaggtcaaatcttaagcacctttcggacttatcttataatgaatggtttcttatttggtaccgaataaacggtcacctgcatctccaagaccaggaacaatgtagccatgttcattcaaatgatcatcgagggctgctgtaaagatatcaacatctgggtgagcttcttgaagagcttttaccccttctggcgctgatactagacagacatatttgatatggctagcgccacgttttttcaaggaatcaatagctagaatagcggatccacccgtagcaagcattgggtctactacaaagatacgacgttgatcaatatcttctggcaatttcaccaagtattcaactggtttcaaggtttcttcatcacggtacatcccgatatggccaaccttagcagctggtaccaaactcaagagaccatcaaccatcccaatccctgcacgaagaattgggacaatagccaacttcttccctgcgatttgtttttgaacggttttggtaataggagtttcaatttcaacatcctcaagaggcaattcacgcaacacttcgtagcccatcaacatagcaatctcatctaccaattcacgaaaggccttcgtagaggtatctgtacgacgaagaatagacaatttgtgttgaatcagtggatgtgtaataacttctaattttcccattttgagatccttctttctaagctgttattattcaaaaaagagctatgataaaagtggagtcaagctctactctttctttcagtccctctttgatactcacagcacatggaaatcttcatttccaactttacattcttcttattataccaaattttacaaaaaaaagagagcccttacacttaattttttaagttcggactcactctttctatcaatcaattacaaccattctttgtatttcttaatatagatacgtttgacaaccgtcacactcagcatataaaggacgataatagcaaacaatagaacaaagtacaatccatttagttggctcaacttcaagatagaagccaaaggactatatggaagggaggttacaaagaaggctgctgctagggtcgtcaccacgactgagaaggctggacgactttggataaatggaagttttggtgaacgcaacatatggataaccatggtttgagaccacatagattcgataaaccatccagtttgaaacaccatgataaaggctgctgcatctgctgctccatggttgtagccatgacctaaaatcataggaacaacaaggaagtaaagaagcatgtaggtaataatatcaaatacagatgaaattggaccaatccaggccataaagcgcatgatagagtttgcttcccagatacgaggtttcttgaggaattccttgtcgacattgtcaaaaggaagggcgatacaagaaagatcatagataagattgagcacaatcaaatgaacgggagccattggaaggaaaggcaaaaagatgctggcaaagagaagagagaagatgttcccgaagttagaagagaccgtcatcttgatgtacttggtcatattggcatagaccttgcgaccttcaaccaaacctttttcaaggaccatcaagtccttatccagaaggatgacatctgccgtttccttggcgatatccacagcggtatccacggagatcccaacgtctgagaccttcatggatggagcatcgttgatcccatctcccatgtaacccaccttgtggccattgttcttgaggcagaggatgatccgcgctttttgatcgggtgataatttggcaaagaccgttgttgtttccacaacttgtgctaactcttggtctgtcatcgtatcgatttcgcttcccaaaagaatccgctctacatctagtcctactttttcacagacagcttgggtgaccttttcattgtccccagttaagatcttggtggttaccccatattctgcaagagctttgattgctggagctgcagaaggttttggtggatcaagaaaggcaaggtaaccggttaggatcatgtctcgttcatcttcaacactaaagatgtcattttcgtccaagtcggttttgtagctgacgcccaaaacacgaagaccttgttcatttaactgagcaacttcagcgaggacctcttgacggacttcatctgtcaggcgtttaatctcccccttgtactcaacataagtcgatacagaaagcatttcttccaaggcacccttggtcaccatgctgaccacaccgtcttcgtctttgacaatgacactcatgcgacgacgttcaaaatcaaagggtaattcatcaatcttatggaaggtttgatccagatcgcgaacaatctcatgtttcttggcttctttctgggtccgattgataatcgcccggtccatcaaattttttagcccggtttggaaataggaattcaagtaagcccggcgaaggactgatagatccaactcgccatggatatcaagcggatactccaaaacgatttcatcttgggtcaaggttcctgtcttatctgtacacaaaatatcgatagcgccgaggtcttggatggcattgagttttttgataacgactttttcttttgccatgatgatggagcccttagcaagactcgctgtaataatcatcggcagcatttccggagtcaaaccaaccccaacgctgagggcaaagacacccgcttctaaccagtcaccatctgtgagaccattgatcacaaagacaacgggcaccatcactaacatgagccgaatcaagagccaagagatggtattcatttctctctcaaatgaggttggttcgtcataggtgttgatggtttgctcaatagctcccatcatggtttcatcccccacgaccaggaccaaggctgttgcccgtccggagatgacattggttcccatgaaggccaagctttcactcgccaagagactatctaaattttgactctcagccttgctgagacaaatcttttcaacagcatcactttcccctgtaagaccagattgttggacaaagaagtcacgggaatcgatcaagaccacatctgctggaatcatatcgccggcactcagtttgatcacatctcctacgacgatttcatcgatcggaatttcttgttctgatccatcacgaagaacggtcgctgtattgacaatcatacgtgataagttgctagctgctttgtcgctccgcaattcttgaatgaagcggataccaccagagatcaggaccaaggtcacaatgatgatggaggtcgttggatcctgttcacctggttttgctagccagacattagtaatgaaggaaaccagcgcaatgactaacaaaatcactgtaaaaggattgatgatggattcgtagatctttttgatcatggaatcttcttgaccttttgtgatgacattttcgccataggcatcgcggttttcttctacttgatcgtcaactaaaccaagggcactggttttgtagttggcaaaggtgctttcaagtggttcttgaagagcagcaatgagtctttctttatttgtttgcattggtatctcctttttcaatcaggagccaatcacttttggagtccctacgacacaaatcagcgattggctggttcggtgcggttcgggatgatcgtcgatttgtatcatagctctctcctttctcttttcttggtaaggcataaaaaagagtcctaccctcgatcggtaggactcatgaaactcgtcatttatttttcaatcaaaactctcaaaaaactgaccgtccaagctttagctccacaaggcaatgaaatgagcttagtcttgacctttgcgatcaggactgttaaccaacgagtagtgtctccactgctttgcggtagtcatccgtatccttgtggtagcctcacctaccgtatttcgagtttattttactccttcactcacagaaagtcaacacttatttgtgaaaagtttccaccaagcgtttggtgatttcttcaatgagggtgaaaggggctgctacattgaggcgagcatgcaagtttccttcttttccaaaatctgttccacggttcaaaatcaatttggcttggtcatgaattttagcatgcagctcatcatcgctataaggataggctgaaaagtccaaccaaagaagataggtgccttggggtttcatgacacggattttggtcttttcatgcaattcatctaccacatagtcgatgtgtttttcaaaaacttgcttgagctctgtcaaccaaggtttaccatggcgataagccgcttctgttgcaatatagcccaagcctgaaatttcatgttgattattggccaattgccgttgtttaaaagccgtacgaagctttggattttcaatgaccacataggaattttttgttcctgcaatattgaaagtcttggttgcactggttaagatcaagctgaaatctttaaagcttggatcaaccgtgttaaagctggtatgacggtggccaaacaaggccaaatcttggtggatctcatctgaaacgagaaggacaccatgtttttgacagaggtggccgattttttccaagacttcacgatcccatacacggcctccaggattgtgcggattacacaaaacatagagtttcacctcttgctccacaatgtctttttccagatgatcaaaatcaatttggaaaagaccgtctttttcgactaacgaattttcgatcaattttcgacgattgagtttgacacttctggcaaatggaggatagaccggtgtattgattaagacagcatccccttccttagtaaaggcttgaatagctgttgaaatagccggaacaacgccttcgataaagacgacagcttccttgtcaaaggaatagccatgttcttctttttcccaatcaaggatagactggtagaggctatccgatgcataggtgtagccatagaccatttggtctgcatagccgataacagcttctcgtacttctggaatgacattaaaatccatgtccgcgatccaagctggaatgatttctggatctgtctcagtttctttccacttgtaggtatggtgggtcaagcgattcggtaaagtcgtgaaatcatatttggtcatcttaagcctccaatgcttgtttcaaatcttcaatcaaatcatccgcatcttcgattccgatggacaaacgaagaagatcatctgtcaaaccgtatgaatggcgaacttctgcaggaatgtccgcatgagtctgagtggtaggataagtgatcaagctttcaactccgccaaggctttctgcaaaggtaaagacttgaagggaattcaacaagttaggaatttttttctcatcttgaattttaaaggagaccattccaccttttccggtgtagaggacttctttgacctgaggggaggttttcaaaaactcgaccaccttgcgagcattctctgtggagcgctccatccgaatagaaagtgtcttgagaccacggatcaacagatagctgtcaaatggggaaagaacagcacctgtcgtattcaagttgtaaaagagtttgtcatacaagtcctcatcatttgtcacgacaacaccagccaagacatcgttgtgaccagctaggtacttagttgctgaatgaagaacaatatccgctccctcttcaatcggatgttgatagatcgggctatagaaggtattgtccaccacgactttggcaccttttgcatgggccaatttagctaaatgagcaatatcaaattccaacatcaatggattggttggtgtttcaatatagaggacatccaccggatcattatctagatggtggatcagttcttcttctgtattggcataggtgaaagagaaacgaccttcttgctcttgttggttaaaccagcggaaagaacctccataaaggtcacgaacggctaagacttttgaaccaacagggaaaatgctaaaagcaagcacgatggctgacattccagagcttgtcgccaaagcatagtctgcactttcgatagctgccaaagtcttctcagctgttgcgcgtgttggatttttcgtacgggtatagtcaaaacctgtagactgaccaaattctgggtgttggtaagtcgtagagaaatgcaaaggagtcgtcaaagctcccgttgctttatccgacttgattcctgcctgtgccaaaatcgtattgatattgcgttttttactcatattgccctccgataaacattcaatctaactgattactattttatcactattatgaggagagcggttttcccattttcaagacctagctatagtttcaaactataagaaaagagagtgggacagaaatcgttaattcgttagaattcgatttcgtcgtcccacctccgcacagttgagtagggctgtaaaagctgatgaaatcagcgtagtagagcccactcaaccactgcgtcttgctcgacaatccaaaaataattgagaggctgggcactttttacccaacctctgatttatttaatccgaaatttttgtctaagacgtgcagcttgacctccaataaagcggtcaaaataccgtagccataatcctaaggctccataaatagcaactcctaatccgcctatgacgatgatataaatcatgctcgatacacggccatttggtgggaaaatccagcccaaaatcaagcctgcgatcaagactccaagtagcatcactacagtcaggatagaaccaagcaaggtccgcttgaagatgatggtgcgattaaactgagtaatggtttggatctcccgatacatgagaacgattggcaccattaaggcaatggtcgttgacaaaagcggcccataagaacgaaagaccaaaataaatggaatttgtaggaccaatttcaccactacaccataaaagaagtagcggatggccttgcgattttgaaagagggcttgaatcattggcgataagaccgtgtaaagaccgagaattaccgtctgcaacatcgctacgatgaagagtcctaaggccaagctatctggttgcccatagaaaaccgtataaagtggttttgcgactgctactgcaccaaaggtggctggaagcaagaaagctagcaacatggtcaagttatcctgtacgagcttcccagctgcttttaggtcccccttcacataattctctgtcaacagaggaatcccaactcccccaatcgaagtcgctactgctatcaagatcatggtaattttgtttggattagcagagaaataactaaacatgaccatgagctgcttttgactatagtctgtgaaccaagacatgacattgataaaggtcatctggtcaacaatttggaagagctgaatcgcagaaccagtaatgataaaaggaatagcttcccgaatcgtatcgatcaagagagcccgagtgtcaatcccttcacttccctcttgctttctaaaaatagaagagagcaagcctgtctttgcaaggtaataaaagagcaccagaaggctcgctcccataccaataaaagccgcaaaggtcgactgcgtcacagcctgcacgtaatcacctgagccaatcttcataatgaagaaggtcgtgagcaacatccagatgacccggatcacttgttctgcaatctggcttatagcgtaaggcttcatgttgttaaaaccttgaaaaaatccccgaatgacactcatcgaaggaaagatcaagacagcccaagaaaggctctgcatgatcggaatcaactcttttcccccacctgaaaggctagcaaagacaggagataacagatacataagaatggcaaatcctaggcctaaaattcccatgaattttaagaagccccgaatcaaagcaaagctatggtcggcttggtcccgggtattgtatttggctacttgcttggcaacagctacgggtaccccggctgtcgaaatcaagagaaaccaagcatagatattgtaacccattgtaaaaagaccattggcttgtggcccatattttcccatccaaatataccaaggaataatatacgcagcccctagcaaacggctgataaaattgctggctgtcatccaggcagtcccgcgtagcatctgggcttgctggtcattttgttcgtgactcattggtgtcctctttcgtttcttcttctcttcattataaacttttccatgacacttgtaaaatagggactttaggtttacaatagttttatgattacaattgaacaaaccctcaacattttaaaacaagaccaaaatttccgagaagttctagtaaatggtgaatactactaccatctagaaggaacaagttttgatgctattagctatgatagccgtaaggtttctgctagcaccctcttttttgttaaaggggccagcttcaaaaaagaatacttggaacaggctatttctgatggactcggcttttatgtctctgaaaaagattatgaagttggtattcctgccatcctcgtcaatgatatcaagcaggccatgagcttaattgctatggagttttatgggcaccctgagaaacaattaaaactattggccttcacagggactaagggaaagacaacagcggcctattttgcttaccatattttggaacaaagtcaccgaccagctatgctgtcgactatgaatacgacgctggatggtaaaaacttctttaaatcgaccctgacaacgccagagagcttggatctttttgccatgatggctgaggcagtagccaatgatcggacccacttgattatggaagtttccagtcaagcttatctagtgaaacgggtttacggtctgacctttgacgttggtgtttttctcaacatcagtcctgaccatattggaccgattgaacacccaacttttgaggattatttctaccacaaacgtctcctcatgaagaacagccaagccgttgtcatcaatagtgatatggatcatttccaagttttagcggaccaagtcgcgaaccaagaccacgatttttatggaagccagtctgagaatcaaattgaaaactctaaggccttcagcttctcagccactggtaaattagctggaaactatgaaatccaactgattggacatttcaaccaagaaaatgctgtggctgcaggtcttgcctgccttcgcctaggtgcgagcctcgaggatatccaaaaagggattgctaagacgcgcgttccaggccgaatggaagtcttgactcagcaaaacggcgctaaggtcttcatcgactacgcccataatggtgatagcttgaaaaaactactctctgttgtcgaaacccatcaaacggggaccatttcactagttctcggatcaactgggaataaaggagagagccgccgcaaggactttggcttactcttagaagaacatcctgagatccaagtcttcctcacagcggatgatcccaactatgaagatcctttggctatcgctgaagagattagtagttttatcacgcgccctgtcgagaaaatcgcagatcgcgaagaagccattcaagtggctatggcgacaaccagcaagcctgaagatgccgtcattatcgccggaaaaggagctgactgctaccaaatcgtcaatggcgtaaaagaagaatatccaggcgatgccgccatcgctgaacgttatttataatcaaatgaaagaaggctaggaaattttcctagcctttatttttttataaaaatgaatcgttctttatcaaattcgacagctaactcatactttccatcttcattttgaatgatgtagcccaataaaactaaactgtcgacaaagatatctcgacgtttctgcatgagctgatcttttttaagaaatttgagcaaaaagctagtcatatacttaagagcatactcgggattgacatctcccaagatggcatagagcttttcttgatcctctgtcaatggatattggtgtttcaccttgtagaagtaattggaaagggtctgtgcatttcgcgcaaagtccgtctcttccaccaaaatcgcttcgttggtagtattgcggagttctgtttggaagacctttgcttttaatttttgataaactgcactgtcctctcgaacaaagacctcctgatccaagtcaacaagatcagctgacttcaagaagggcaggttgagggtgtaacgtttattttctcgaaggatgaagcccgctttgatatactcctccatcagcttatccactggttgatctggaaattgggccttgatttgccgcaggatcacatcgtcgtgctgatccaaaaagttgatcaagtccttaagaaatggctgacgtgtcaaacgtgtaggattaatgattgtaatcataaataggtctcgtttactgttttatcggttcgttcttattgtaacataaaaattagtttaagcgaaatcaataccaaaggacaaaatcttcaatttatgtataggcaggcaagaggggaaaataaggcaataaaagaacttagtcttttcaatccaagtttactgtagaagccccataagttattccaactcatttcatttctattattttgaaagaaataaaatcagtcagtagttgcttaatgcgttctggacattcttcattgtccctactgtagatactcactaagccatgtaaaaaaataaagattccactacgaatatttagcgcttctgcatcagataagtctttcggtaaaaagacatcaatagcttcttccaataaacgataacttttcattctcaattgcatcaacggttgcgaacaatcgcctgaatcttcatgctctccacggtaaaaaatcaataattcataaaaattacgttctctaaacccaaaatccacgtatgtttgacagatttgaagcagacgttccttatcattctgcttggaatgactgatttctaagcaagtatgatagaggtgagttaacggtttttccgctactgcatataatatatcctctttctttttaaaatactgataaatagctgtatgtgaacatcctgcagcttgagcaatctgcctaattcccaccttctggtaaggttcttttcggaaaatttcctctgctactctgataattctggaccttgtatcctttgccattacaaactccctttaaacccatccgatgcctcaaaatctcgtactgcatcttttacctcactaccatgacaaacactaacaagtgcctgtgaataatccttgagaattctttcaccactagctaaagcttgtctcatatctgctgtatatcctttcattggtggacgcaactttccacctctcgtagctgtgaaaagatctccagcgattaaaacttgatcctcttcatggtaataaacaacatgaccaggtgaatgaccaggagaaaatagtggttttaatcctgccctacttaacaagtcttgaccttcttgactttcaacagttataaaagtagccgggtcaaaaatgactttttctttctcttttctatttggaaaaggctctttgcctgaaatataggggaattccttctcactgattaaagtcgggatgttaccaaagtactgtctaagatagggcaaacctttgatatgatctggatgtccatgggtcagaaaaattgcttcaattttttgtgggagtaaaaactgggcagcgtacttctccattcctcgcattcccgtatcaatcacataaaagcgactagatgattcaactagccatatgctgacaacaaaaacacccaattcgaactcaaactttcttatatgtggactgatttgttttgtacgtgttaataaacgatacaagaaagacatatttacttcctcctttgaattccggcaaaaactaaccagtggttagtttttttgtgaagtatatcatattttatctgtctaaacaagaaacatccagaggatagtagaaaaaatacaactttttcaagttgtattcgaacgtaaaatatgtttttaaagtaaaaaatgatatatcgagactttccactgtgaggaaaggattaaaatattatttttctttagtttgatgtaactcttataaactgtatcaaagtttcagattgttatttcatgaatccaaatcatccaaatacctttctttaaactgtagacggggagactgggctaactgactcgggttggtcccaggctgatctaggggaacggctaggccaagctccttgtagtaatccagccagaacggactaatctcctcttcctcatctccaaacttcatgggaatggttttaaagataggaagtagttcagcgatgaactgggaacagtaataaccatctccatccggataaaaggaagcattgtagggagcccctaaaagactctctgctttctttttgacctctggacaatcaatcgccgcatagcgataaaggtcatatactttctcagcttcaaagaaatcctcaggggactgggcaagaacgccaccttctaccgtggcatgataaatggagccgtccaaaaagatggccacatggctatagttgccagttgatgcctggatggcctgccccatttctgtattttcactgacaaaaatcaaatcacccgtctctaacatggtcttctcctagcaaaaaaggagccgaaactcctttttaataatgggttttcccacctatcattaagcattaaagctttctgtcaattgtggtaccacttgtttcttacgtgaaacggcacctggaaggaaagcgtggttgttttcaagtttgaagttgaaagcagcttctaccttgtccatattggcaccaagagccaagatttctgagtttgagttaacgatgtctgtaatcatcaaaacaaagtcagagtatccgttagctgcatttgctacttggatagctgcttcgatttcagcttggcgttccaagacttccgcaatatcaactgtgttcacttgagccacacgaacgttgtttccgttcaattcaaaagtcttagcatcgatatcgatcaattcttctgctgatttgcttgccaagttagtaccagccttgagcatggcaagaccgtattcttccaagttgacaccagccaattcagccaattcaggcgcaatgactttatcagatgggtgggtagttggagatttcaaaagaagggtatctgaaatcaaacctgaaagcatcaaacctgccaattcttttggcactgctacaccgtgttctttgaacatgcggtaaacgatagaagatgctgatccaactggttccaaacgcatgtaaagtgggctagcagtttcgaagttagccacacggtggtgatccactacaccataaacttctacttcagcaatatctgaaacagattgttggaattcattgtggtccgtcaagatgacttgttctgcaccttctgctttagctgatgtgatgacgcgtggtgcttccacaccaaaatagtccaatacgaaagctgtttcttcatttggagttccaagagccactgcttctgtatccaaaccatatgcttcttttgcaagataagcaaaagctacagatgagccgatagcatctgagtcaggattttggtgaccaaaaacgagaatttttgacatatttctacctctttatttcatttatagattcactctattttaacacgtttttccgtttaaagaaagggaagaacaatgcattcactagaaaaaacagttgggattgccaactgtttttcttctttatcctttgacccgtttcaggtaatcttggtaactttctgtttccatcaaatcttttgcattttggacccgttcttttgtcggtggtttcacaccctccaatttgtacggaattcccaattcacgccatttgaattcccccatagtatggtaaggaaggatctcaaatttatcgacatttttaagggttttaacaaattttccaagttcgatcaagtcgtcatctcggtctgtcaaacctggcaccaagacgtggcgaatccaaacgggcttgccaatatcagacaaatacttggcacaagctagaatcgttttattggtatggctggtcacaattttgtgtcgttcatcattgatttccttgatatcaagaagcaccaagtctgtcactgccatcaagcggtcaaatttttccaaataacgaggcgtattccggaaaggaagagcacaggtatccaaagtacaatgaatgcccaactcttgagccttggtaaaaagtgcaatcaaaaagtcaatctgcaagagggcttctccaccactgacagtgattccccctttttcgccccaaaatccacgataacggagggcttcttctaagacatcatccaccgtccgctcacgggacttgttggtttccattgcccaagtatctggattgtggcagtattgacaccgcatttgacagccttgaaggaagacaataaagcggatcccaggcccgtctactgcaccaaaactttctgttgagtgtaccattcctgttacttttccatagtcaactgtttcattttccattgaggaacctcttctcttgaaaacgttttatgattttattataacacgattccatctattttaaagagtttaagcttctttttgaaaagaaactgttcttttcagtagttttcattgtcctagtacagtttccaatatgggactatctgtcctgtattttaggagaaaaaaagagccagcgactccttttttagatctttcttttgaaaacgttagtaagtctttttcttcttataccagacaagactcatcgtagctattgccactccaaaaagagctagatagcttgtttcttgtccagtagatgggaggattttccgttttcctggtgtcttcgtttctgttgctgcctcttccttttcgtcttgcttctcatcttcgttcttgcccttctctttgctttcagatggtgaactcttttgttcattggcttgagcctgatgagggactagttgagatcctgtattcgatgaggaagggatggtttgatccgttggttgtcctgtattcccttgttgatcatccgtcggcgttcctggagtttgtgctccactaaagtcgatttggaccaagacaggatcatggtctgatgcacgaccatgttccttcataaaggaagcattgatatggacgggttcaaaccttgctttggctgccatgttgtttgagataaaaatgttatccaaaacttgattgcttccacggtagaaataagaatagcgatcgcctacatcatgttgagccattaagttggttagttcactacccgcaaggatctgtgccgtggttgagaaatcgtagtcattaaaatcacccgtcaaaacaaaagtggtcttaggattttgcttcaagccttcttgaacgaattgatggatgacactggcttgtgcttcacgagttggcaaggtatgttccactgctggttgacttgcaccataaatagcatcatctccgatttttgatttcaagtgattggcaatcaccacaactggttggcccttgaattcaaactcaacagctaaagacttgcgagtatgatcaaacgatgggtcatttggggcaatacgagctggatttttaaccaagtgtcccttgtcaaattgcgctgcctcgttgctagttgctgcctcttttttggctaaggctacgcgttctggattgtagaggattcccaaacgaatattggaaccaggctttcctccgtcagcgccatctactggagcaacctccgtatactcatagctcttaccccccaattccttgatccgattggctagtttgcgtccactttcaacaccactggtcgttccgtcatccacactaccattattgtcctgcacttcgatcaaagtaatgatgtctggattgtgaatttcatggataaaggaattggcaatcagcgtcaccttatcctctggggtttcatttttggcattgttggccgagaaattttcaatattgtaggaagcgatggtcagcttgtcctcacttggttgcgtttgagctgcttgacgctgcaagccaccatcttggaccgtcaactgttgagtgggctctaatttatagaagctatttcgatacgttaccactcctgtcacatcttctgtaaagtaatccttagcttttgcgacaaactgattcccaacataaatcgggatcgtcgctgtattttgcgcatgtggccgtagattcagacctccaatattgtttaaaggaagacctgtgaaatcttctcccaagacatagatatctcctttgtactggggaccaaggacatgcggtttcttcaccaccgtgagcattccttccaggctttcccaataatcgagggcatcggtttctggagcataagcagtcggattaggcttcacctctgctggcatctccgcagtgatattcacagcttctggaagaggggctgacccatctttggtgatccaagtgtcaaccaacatggtcaccgttaaactattcgtcggttccttaaaggtcttcccggctcccaaagtgacttcctccatatagccttccttgacggtaccggtgattttcaccttatcgccgactttcaccttgtatttggaaacaacataaatcccatctgaagtacggctattgccatccgattcaatatcttgggcataaaaaccatagcggtctgtcttagtcaccactgcatttttgatggctaccttttggccttccagtggagagcgttgcgcttccccttgaatgtccccgatcttaaccgttttctcctcagcagcgtctgaggaactgctagatgtctcttctttatcactcgaagctctcgtcgtagcgtctgtagttgttgttgtagcagaagtcgaactatttgtcgagctttcctcgctgctagtgttcgtcacaagcgctggctctgaagtcgaagctgtggtctcgtctgcaactaccgtgagggcactgctaaagacccccaactgactagccaataaggtggctactcccagtaggcgaatctttttaccgttttttctcatgcgtttctccatccctaaaaagttttcctcttttattataagggaatgactttgtattttcaagcgctttcaaaaatatttttcaaaaagaaaaacacttcgacccaaaaagatcgaagtgtgaaatacttaaactaatatcgccagtgtctgatatggtttcagaattactttttcagaaagctctaccttctcatagttggataaaagcacgcgccctgtttggtagtcttctggaatcgctacttcaacttcactgccatagaaatgattgagtaccaagagtttttgaccatctaagtgacgttcaaaggcatagacttctttactatcctccattgctggcagatagcttccttctgaaatgatccgcatttctttacgcaggcgaatcaattctttataaaatataaagattggtccatccatttccttttcaacattgatgtctttataggacttcccaaccttcaaccatggtgtgcctgttgaaaaacctgcattttcataagcatcccattgcattggcgtacgagaattatcacgtgatttggcttgaataatcttaaaggcttgctcaggagactgaccttgatccaaaagcatctggtaagcattgatggactcgacatccacataatctgccatcgaatcatagtctggatcaatcatgccgatctcttcgcccatgtagatataaggtgtaccacgtgacaagtgaatgctagcagcgagcatggtcgctccttcattgcggaagttcttgatacctacaaagcgattcaaagcacgaggttggtcatgattattccagaagagggcactccaaccacctcgttcactcatttccttgccccaggtatggtagagacgctcaagctcttgcaggaagaaggctttattgagactgttcaaggaatggggtcgcaagtttctagacaagcacactttgacttccccgtttcccaattaaccagctaccaagaaatcgtcaaagcttctggtcttcactcagaaaccaatgtcattcgtttggaaaagatcagtatcgatgaaaaaggcgctaaaaagacaggtttcccccttcaccgattggtttggaaagtaacccggcaacgggtggtggatggtgtcgcttctgtcttagatattgattacctagacagagagctcatccctggcctgaccaaggaaattgcccagcactctatctaccaatatatagaagaagacctgaaattgcagattggctatgctaaaaaagaaattttgatttcaccaatcgataatcgtgacaagatcttactggatctcggaaaagacaaacacgtggtgacagtccgttcccaagttcacctagcagacggacggcaattccaattcaccgaaagccggcacaaattagacaagttccattttgtggactatgcagagcggaggaaataaaaaaggccgggacaaaagtcctagcctctcaattatttttggattgtcgagcaagacgcagtggttgagtgggctctactacgctgatttcatcagcttttacagccctactcaactgtgcggaggtgggacgacgaaatcgaattctaacgaatgaccgatttctgtcccactctcttttattttatcctaataccaattcatcactaaccagggtttcaccactgttttgttggaagaggcgcatcaaatcttcaaccgttaggtttttcttttcttctcctttgacgtcgacaacgatcttgccttggtagagcatgatcaagcggttgccgtattcaattgcatggttcatatcatgcgtaatcatcaaggttgtcaaatcatggctttccacgatcttttgtgtcaattccatgaccatttcactagtcttaggatcgagcgctgcggtatgttcatccagaagcaagagtttgggtttgaccaaggctgccatgaccaaggtcaacgcttgacgttgcccaccagacaaatattgggtgtcgactttgaggcggttctctaaaccgatattcagttccttcaaggcttcacggaataattcgcgatctttctcccgaactccccagcccaaaccacgagatttcccccgacgttgggcaatggccatattttcttcaatggtcaaacgagaagctgtccccatcttgggatcttggaagacacgcgcaatatctttcgcacgcctacgaacactcgcatttttgatagagttaccttctagcaagatatccccttcatccacgactagatttcctgccaagatgttcatcaaggttgatttcccagctccatttccaccgataaccgaaatgaagtctccttcttctacttggagatccaagccttttaagacatggttttcattgactgttcctgcttcaaatgtcttatgaataccttcaattgataataatgttgccatacttttctcctacttatttcctaacttcaatccacgaacacgaagacgtttttgcgcctcaggagcgaacaagacaatcgcgagcaagatcgcattgaagagacgaaccatattttgatcgagatttgggatctcgtaaatatttaagataatcaaacggtaaacaatggctccaaccccgatggaaagcaagcgccaaccaatggtcaattcgtggatcaaaacttcagcaataatcaccgcacttaagccaaccacgatcgtccctgtaccagaagtcacatctgagaaaccatcattttgcgcaaacatcgctccacaaagggcaatcaagccattggaaatcatgtagcccaacatcttcatgttatctacattgaccccattggcctcactcattggaatgttatcaccagtcgagcgcaaaaccaagccaagttgcgtcttcattaagagagttaacaagatacagacgatgatcaagcaagaaatactaatcaaaaagactgcttcttcattggacaagcccaatttcatgacacttttgaaaatggtactggcatcaccaatagagaggttgggtactccccccatgattttaatattgatagagtagagaccggtcaaagtgacaatccctgtcaagagggctggaattttcatttttgtatggagaattcctgaaaccaatcctgcgatcatccctgccaggaagcctaacaaggttgcaagccaagggtttcttcctgcttgaatttgggaagctacaactgctgccccaagtggaaaggctccttctgccgtcatgtcagcaatatctaaaattcgaaatgttaagtaaacaccgatcgccatgatcgaccacaataaaccttctgataaacttgataaaacgaaattcatctcaaacctcctatttttctaccttcaacgagctaatatcaattccaagctcttttgccatctctttattggtatgcaattctaatttttcaggtgtttcaactgcgactttgccaggtttctcacccttcatgatgcgaatggccatccgagcagcttgtcttcccaattcctcataatcggtaccaaagttgtacaagccaccagtagctaccatttcagcagatccaccaaaaacgggcaccttatggctgatggatacctgttttacagtgtccattgtagaagaaatgatgttatccgtcggaacaaagacgatatctgcttctgacatgatactgtctgctgcagctttcacattgttactatcgaggatggttttttcaaccacttgatagcctttagcttcaaggatcttcttcgcattgtctttttggacgactgagttaggctcactttgcgaatagaggatcccaactgttttcgccgttggaagcacttgcttaatcatgtctacctgtgtagagatcgcatcgtctgactggtcacttgtccctgtaatattgccacctggttctttcaagtttttcaccaatttcgcagccaatgggtctgtcacagctgagaagacaataggtgttgatttagtggtattagccaaactttgtgaggaaggggttgcaatcgcaaagactagatcactttcttctgccaattgtttagaaatatttttcagatttcgttgctccccttgagcattttggaaatcgatctgaatatttttcccatctacatagccctctttcttcaactcctcgataaagccttttcgtgtcgcatcgagcgacttatgggtgatgtactgggaaatcccaattcgaaagacattgtcttttttagtatcctttagattgtgtaaggtcaccaatgatgttaacagaagtcctacaaccaggacaggtgctagcaattttttcactactttcatttattgactccttttctgcaaaataaacaaaaaatccgcttagatgatactctaaacggatgcttgaaattctccaacaagttacaaaacctcggtccatttagatactagctctatggaccatcatcaaaaatcttagccacatagatacaaacaaattgcttgggttgtttgcatccatgagatcatgtctacaaacactatctaaagtagctaaagtaaaatttttgagttgaaatggcttgttgcttcatgtttattttctgctttctttttttatgggtattatcttaccgtaattttttttggctgtcaagactatttcagaaatttttgaaattttttgaaaattcaactggtcctgacaagaaaaaaaaaacagaggctggaacacgtccaagcctctattttttaatcttcttttgatttagtttcttcatcttcctcgacgatttcagaaatttcaactttcaccttggtcacacgaccattttttactttgtcatttgtcaaaatgaggtgtttcttttgactatcgacttcacagctgagtcgctccttcaaggttggaattcgcccaacctctgtcagataataccctgcaatggtatccacatcatcactttgcaactcaacatcaaaatattcgttaaagtcatttagtgacatggctccttgtacgacataggtattgtccgcaatttcaaagacatcaatttctgctttgtcagtctcatcgtcaatttcaccgacgatttcttccaagaggtcttcaagggtaaccaaaccagacatcccaccatattcatcaagcagaatagccatttgattttgggtattgcgcaattccttcaaaagatcatccacaaaaatggtctctggaacaaacaaaggttcttgtaaaatctttcttaagacaatattatcaaagccattgataaatccttcgttcaagagacgtttggtatggatgagaccgatgacattgtccttgtcatcatcatagacaggaatccgtgaaaagttttgcttaaggatactttcaatgatttctttggtatcatcattgatatcaaccatgaaagcatctgtccgtggcaccatgacttcacgcgctaccatttcatctaatgaaaagatcccttggagcatctcaatctcgtccgcatctagtgatgcttcactattggtcagcatatactcgatttcatcccgcgtcatcttttcatctggatcatcgaattccattggtgtgatacggctcaaaaggttggtcgacgctgaaagcaaccaaacaaaggggctaacaatttttcctaataaaatgacaatcggagctgttcgaacagctaactcatctttcaggttcatagcgattcgtttcggatagagttccccaaatacgatcgaaatataagtcaaaaacgctagagataaaaagcttccagctgtaagtgccgttttagtattgcccatccatccagcaataacatgaccaaggctatctgcaagactcgccccagataagatggtaatcaaggtgatccccacctgaatagtggataagaaatggttgggctgttccaaaacgctaagaagacgaatgtattttttatccccttcttctgctttttgcactacacgagaacgattcaacgataccattgacatttcggttgccgagaaaaaggcattcaacaatgttaaaacaatcaataaaataaattccagtaaaatttcctgactgccagggtcttccatggataatttcctccagtatataatattgtatattataccacaaaataggagagcctgcattcttctataaaattttctttttttaccatcaaaaaatcaggaacaagtcctgattttagtgttctgcactggtaaaatcataaaagaaggcattgagtttttcaaccagctcaagcgatgagagactacttgtacagataaaaggttttttctttaattccggcatcataaagttggctaccaccacatctgcatccgtagcttcgatatcgtccactgttagattgtacttgatcatctgtgtaaattcaaagttgtccgtacagtaaaaatcaaggaaatcaatcatggatttggcatggtgatcgtcaaaacgactgataatcaagaccttaatagacttccgacggcgcaataactgtggcaagagacgttcccagtgagtgtataccgtatagatcatgtgcttgatgatctcatcattcagatcatgcttcatggtcttcatataagtgatgatatgctccttcaaatcatcatagaaggctgggaagatgctcataaaatcttcattggtgttggtcttggtatcaaataagagaaactccgagaataattccttccgaccaagatgagatgtattatggacatgcatcaacatttcatctaaattctcaatttctagatcataggtatagcatagatccttgaacatatctctgatgagcgtcgttgattctttggcataagtgtctgtttctgcagcttcgatcaaactttctggactgaaatagaaattctcttgaataaagataatgaagaactgctccagcacttgttcattcaactcgacacccagctgtaagctaaaatagcgcaacatctcctcgacattggtcacctcttggtactgatctttataagcttcaaaagtggttggcatatcaataaagaagccttgcttaatgcgcgacaagtagactgtcaagagaactttataagatttgataacagaaaaggtcaatggatagccatagagtttaaagaaaaaagtaatcaaatcagtcacagcctcttccttaaattctgggaaaggccattccatatagtaataacgctctgcaaaatattgggcataaaagaaacgaacatcgatctcattcccaacaaggttcaaaggtttcaaatcaatcttcacattgtatttagtttgaagtttctgattaattgtccgaatcaagcgatagaaagattggtaactcagatcaaactttctgcaaatatattcattggaaacatccttgtggaagaagaggtattcaatcaaggcgaaggcttgtgattctttaaaaaagtgatggtaaatcacctcaagcccaaccgaatcctcataactgatcttgatcccattggtagaggattcaattaaaaactcatcaaatgtactacgaagattagacaaatcttcttttaacgaacgttctgtacaatccaaacgcttggccaactcttttaagtgaaaccatcttttctccttgatcaagatttctagcaattggagttgacgtctttgttttttggataagagcagtctcatctttccctacctattttcatattttatttaaaaatcacttatattttaacacatttcataacagttgtagttttttaactgtatttttctcaaaaaactgtacaaaaaagactccaaggcccatataggcgctagagtctaagatttattaatgattccaaattcttcttttttcttctgctccttggcagcacggtggttatcataaagatttaccaagaattttacaatttctttcccaatcgaatagactggaatcgcgacgaccatcccgataatgccgtagatattacttgagagcaataagagaaccataatggtaatcgggtgaaccttcatcacgcctccaacgatacgcggataaagaatattgccatcgatctgctggataatcaacatgtaaataactgctttgatcatcatatccatatcggtaaaagcataagtgatgatcatcggaatcaaaccgatggttggtcctacataaggaatcaagttggccagcccagaaaagatggcaaagaccaaagcgtacttcaatccaataaaactatagccaatgtaggctagtgtcccaatgatcaaggcatcgattgaaataccactaatatagcgagagaccgtttcattcaaactaatcaagaggcttgagatatgaagtttgtcattgcgtaaaatggtccgctctagcatgggcagtaacttcttcccatcgatcaagaaataaaccaagaagacgggggtcatgatcaaaataaagaccgtattgacaatggtgttaaccacacttcctaaactgttggtcacactattcaagagattttgtaggatatccacataagagagattcaactgctgaatcgtcgattggatattcacattctggaacaaagggttggtcgagagttttcgaaccagactttggacttcccaatacaggccttgggtcgagttgatcaagctggttaactgattgattaagatggggaggagataaacaatccccaagcccacgatgccaaataagaccaccaaggtgatcaaaatgccaaacacacgcttgattttaaggtatctctccaacaattccacaactggattggtaatgtagtataaaaaacctgcaattaaaaatggtaagaggatggtattcagaacggatacaaatggagaaatcaaggtgcccatcgatttccaaatatagaaaatcaccgtcaataataaaatctcacatgtccagaataacaatttactatttcgaaacattccttacctcctgttttctattctaccatattttatgttagaataaaggagattttaatcaaaaggatgaagttatgaataatttgattgaactacaagacgtcaatttgatccgcaaaggaaaatctcttttaaaagagattaactggcgagtaaaagaaaatgaatgctgggcgattttaggcttaaatggagcaggaaaatcgaccctccttaaactgttgatgtctgaatactgggctagttcgggacaggtaacggtccttggaacacgctttggagaaggggggattcctgagttacgaaagcgtattgggatcgttagctcctttatttcagaaagactgccagagcatcttttgacagaacaaattgtcctaaccggtcaatacaagagtagtattttatatgctgcatacggggagaaagaactaaactgggcacgggatatgctgacttctattggggctagctctctgatcggtcgcaaataccgggagctctcccagggagaaaagcagacggtcctcattgcacgaagcctcatggaccagccagatctgatcatctttgacgaagcttcaagtggattggatctctttgccagagaaaagctcctccgtcagatccatcatatcaaacaactggatcacgcgccaaccatgatctacgtcacccaccatgcagaagaaattacaaaagatatgacccatgtgctcctgctcaaacatggccaagtggtcgaagaagggccaaaggaaaacatcctaactcctcatgtacttagccagttttacgaagcaccagtatcccttattgatctgggtgacgagcgactctttgtcaaaccagaaatcgcacacacagaagaccctgaataaatcaaaaagtgctaagattttcatcttagcacttttagaatgtagacaaactactttaaagtaaaataagttaagcgattttgcaaaaaaataaaaatgagttccaatttttaaatcgattcaagaaaataccgaaactttccgctgtgagaaaagtgcctgaaacgttattgtttcaggcactcggaattattgaggccctaggctcaataattagtcatggaacttcaaagaagttcgctgacgtccgtactcacctaaggaaagttttttatatgactttttcttcaatctgaaagtgctaagattttcatcttagcacttttacgcttatcgattttgtgcatactcgatcatatcgtatggaagagtattggcactttctcttagggagtagctttctaattcattgacattttgacgcatgcgacgcgcttgcttggcggtaatcaggtgttgcgcttcgtattcaaaaataatcttacgctccaaataatagcctctcaacatttcatcgatattatttggtttcacccggttaataacccgctccacaaaggctccactagtaataatggctgtctctctcagacgagattcttgcaggtaagagatcaaactgctccgatatacccctttgaggtcttccaaactttcaatgatgatttccgtattggccaaataaagggccgcaatctggtcataatcaatggcttctaactttctatcttctcggttccaccaagttcgaaagccagaacctagtgttaggatttcatggaccagcaaacgcaagatgcggaaagaaaccaagaggtagtatgttagacgagacgaaaggttgcgattgacccgttgctccatattacgaagatagcgttggtagacacggtagccccgctcgcgcatctttccttcttcgtaggcttgttccaagccgtcactttcaatactcaaaatcaagagcttcagctgttcccagtccttttgaatgagcttattttcttggcttagaatcaaattttcaatccgaccatgatagttatcaatcgccgcatacaagggccccttgtgcttactattctttaggtctgcttctaattccatgacgacatcatttaaaatcgcgatctgcatcaggtagttattagtttcttccttatcttctgataattttggaagtaccactaagccagcaataaagctgacaagggtaactcctgccactaaaaagagtaggacggggtattctttttcgattttggttggaatcaaaaggatcgttgcaatcgaaaccgttcccttcacacccgaaaaggtcagcaataaggcatcttttagataatttctcaacgatttttttagtcgaaccgttcggaaccaataaaaaaggtaaaccatgacaaaacgaatcaaaaagagcaaggttgtcaaaagaaagacagaaagaactaaaagaagattgttgtaaatgggactacttaggatgggcttggcgatcatttctagttccatccccaaaatcacaaagaccgacccatttaagataaagttgaccgtattccagacggtatggctcacagtatccacccgagcttcaagaagggtaatgtgcttaaagcgactggcttttaggatccctgacacgaccacagcgatgataccagagacatggagttcttctgctaagaaaaaagtcaataacgggagactcaattctaataacaattcactggcaatatcactagcgcgaacactcaagagtaatgtttgcagccaccggttcacaaaggccgtcaagatccctactgcaaatcctcctataatggagattcctaaggaaatccctgcctctccaagggagaaacttccggtcgcaagggctgccaaggccactcgaaaggcaactagacctgaggcatcatttagtaacccttctccttttaagatattcgaaacccgctttggaaaggtaaagcgctcagacagggaagcaaaggctactaagtctgttggacctagagctgcccctacggccatacaggctgctaaaggaaggctcagccacaaggagtgagctgcccaccccaaactaatggttgagataaaaattactggaaaaatcaaataaagaatgatgcgccagtgctttaagacagaagtaatatctgcttcttctgcctctcgaaataacagagggccaatgaccaaggccagaaagagctctgtatctagatgaaaattttcttctgggacaaagagggcccaaacgatccctagtaaaatttgaatcaagggcagaggaaggctcggcacaagtttattggtgacatttgagacgatcaagatcatcgagaagatcactgcataaaggagtaattccatcttcctccctccctagcgttcttggcagcaagtctcaaattgctgttttaactccgcaatcttttggtctgtcttggttacatccttgtgctcaatcttcttttggcaccgttccatctcaagcgcaaccaatttcttttttattttgagcatctttttggtcatatgggcttcatcataaaaaccgattgcacgctcgtgaatggttgattcaacaaaatggtgtctcaatccttcgattttattctttaaatattctttatccatgacggtaactttctaatttttcgatcatgaccaaaaacggtggctgattcacttgattcagtgtccggtagatggtcgctgtgtaatctttttgagggagctgactgacaaaatccagcactgcatcacgctcgatatctcctccctcatgaccataatagatcatcaaagccattcgaccacctttttctaggcgagcacagattttttccatcgcttcaatcgtggtaactggaagagtaatgaccgacttatctgcagatggcagataacccagattgaaaatagctgctttgagggtctctacatattggtccacatgctggtggccatccaagatcaactggacatgttgaagccccaacttgtccaatttttcttgagtgtttgcaagtgcctgctcttgaatatcaaaggcatagacctgacctgctagttgggctaaaaaaaccgtatcatgcccatttcccatagtcgcatccaccaccacatcttctttggtgatgacttctgctaaaaattgatgggccatttcaagtggtcgaagcattggcactctccttttcttccagcatacatccttgggtacttccacggcgacgcatttcagtttcaatagcgtttaggacttcccatttgttgaggctccacatagggccaatcaacatatcccgtggtgcgtctcctgtaatccggtggatgacgatatgtttggggatgatctccaactggtcacagatgaccttgacatactcctcctggctcatgagttgaagtcgtccttcatgatagtcccgttgcatccgtgtattggtcatcaaatgcaagaggtgtaacttgatgccatcaatttcattatcggtcacacaacggcgaacattttccaccatcatctcatgcgtctcaccaggaaggccattgatcaaatgggagacgatctcagccttgggcacctgttgtcgaatacgcttgactgtttcaacatagaggtcataactatgggcccgattgatcaattcagaagtcgcttcataagttgtctgaagtcccaactcaatcgtcacatgcatgcgctctgtcagctctgctaggtaggccaaggtctcatctggtaaacaatccggacgcgtaccaatgttgattcctaccactcctggttcattgatggcctgttcataccgctctcgaatgacttccactttctcgtgggtgttagtaaaattttgaaaatagaccaggtacttcttcacatctggccatttccgatgcataaaatcaatctctttgtaaaactgttctcgaatcggagcttctggggccacaatggcatctcctgaacccgagaccgtacaaaaagtacagccaccgtgggcgactgttccgtctcgattgggacaatcaaagcctgcatcaatcgggactttaaaggtcttttctccaaataaggttcgataataatcattcaaggtattgtaggatttcatacccttcattatagcaaaaaaagagtcgaactcaaaacgcgaattcgactcctagttgttagatgcttatttttgcttgcctgtaaagcgccattgaaatcgcaagcgatcatacaagggatactcaaactgtaagacagcaagacccaaaatcatactgccgagaacgtctgatgggtagtggaccccgacataaacgcgggaaaccacaatggtcacgattcccagaaccagcaagccttgaaggaaatagcgggctgttttatgttttacatgttggctgatgatgatgatcaaacttcccaaaacaagggtagacgccagtgaatgaccactcgggaaagaaaagcctttttcctctactagatgaagaatacttggtctcggtctctggtagatattcttcagaagaagaaccaaaagacctgtcaataccagattgctccccagaaagagggcttcgctgtaccatttcttacaggcaaagacagctagcaaaagacccacccagatgagaatgatcttggtatccatgacatgggttaccttggtaaagaaagccgtcagtggtgcaggcagatcgcctcgaatagcagattgaatcgtgctatcaaagcccgttaattgttgcgggtagaaacgaatcacataccctagaatgacaaaaatgagaagggcgaagcttgccttcgcccaatgttgttgtttatttttcatatcttttcaaaatcggttgcaaaagagtgtagatcaatccaaatgcgatggcccaaatcactccttcgatcaggttaaacggtgcaaccattgcggctaaatagtggacaagccctagtgttttcgaaatatcatagttcataaagcgagcatacaaagggattgcatagacatagttcaccaataccatcgtgatactcaagctgatcgttccgacaatcgttgccaggacaaatcggccatgggtccgttccttgttccaaatccatgcaaaagcaaggacaaaaacaagaactccaatgatattgattggtagtccgatcaaggtttcaagccccttattattaagagctaatttaagaacagatcggatcaaggtcacccaaacagcacttttaaaatccaacaagaccaaagccaacaaaatggcgatgatactcaaatcaattttgaagaaatctatcaagaaagaaaattgatagaacatcaaaataaaagataatgcggataaaacagccactagggtcagtttacgtgtatttgtcataacaggttcctccaattttttaaaaattagagaagctggaaagacgtctaccccatcattctactctaaactatttaaacaaagcttaaactagagaacattctagtcactttagctggtccccattgaaaataccgctagtcaatcatagcacctaacgtcttattcctatgcatcagctctaaacagatcagaatagctgtcagtctattcgtctctcgtcttctcccatccagactatactgtcggttgtggagtcacaccacatcagcttgcgctcgcggacttcttttagagtatggaaatggagatttttcttttaaacgatacgacaagctgtaggcataacttctcgttaagcaaagcttggcaacaaagtataaaaggaaaagaacatttcctagtaaaagtcaccgccggtcgggaatctcaccctgccctgaagacctttttatgataacaaaaaaaacttgccaaggcaagtttttgtaacttgatagattacatcgttcgtcttttaatttctcgttcttatttgagcttgtcatgctcataacgatggctcaactctagccccttaaaaccttgctggcggagcgcctcataaacaatcatgcagacggtattggagacatttaaactacgaacatgctcgtcattcatcggaatgcgaatggccttctcctcgtgctggcgcataaaatcttccggcaatcctttgtcctcgcgtccaaacaagaaataatgggatttcccatcctgataagaaacgtccgaataagtctgatttgcaaacttagacaccaagtgcacctgaccgtcacacgctgcttccataaactcttctaagctatcatagaaacggacatccagcttgtcccagtaatcgagtcctgctcgcttcatcttgcgatcatcgatcggaaaagccatgggacgaataatatgtaagggggaattggttgccgcacaggtccgtgcaatattgcccgtattttgtggaatctgaggttggaacaagacgatgtggttttgagccgctgactcttggtagtctagttcttcaatattcatactcgatctctttctgataaaaaaatagccacactgcccggagtcaagctcagcaaacagcgtggttacagcttcattaacttaactcacaacaggtttgaggtaaatcaacgaaggtacctcttaagtatatcacttttgaagctcctgtcaatagtttttttagatttttttaagaaactatatcaaagttttcgatccctcctcattcttctattttgacaatttttcccacttgttcctagcttggtataattcctccagaaagtccttaaaatagatgaatttttcttgaaaatagagtatgatagaagcatactctggaggtaatctatgaaaattattgttgttggtggaggaaaggtcggaacggccctttgtcgttctctcgttgctgaaaaccacgatgttattttgatcgaaaaagacgaatccgttctcaaccatattaccaaacggtttgatatcattgggattttaggaaatggcgcaaacttcaagatcttggagcaagcagatgttgaagactgcgatatcttcgtttccatgaccgagtacgacgaagtgaacatggtttctgctgttttagctaaaaaaatgggagccaaagaaaccatcgttcgggtgcggaatccggaatattccaattcctacttcaaggaaaaaaatatcttgggcttctccctggttgtcaatcctgaattgctgacagctcgttatattgctaatattattgacttcccaaatgccctttctgtggagcattttgcaaacggccgtgttgccttgatggaatttaagatcaagccagatagcaatctctgcaatatgagcctctcccaattccgaaagaaatacggaaacgtcattgtttgtgcgatcgagcgtggcaacgaactcacgattccaaatggagactttgttttgcagccccaagacaagattttcgtgacaggaaataggatcgagatcgttctcttccacaacaatgtccgacctcaagtcattaagagcatgatgatgattggtgccggaaaaattgcctactatctgctcaatattctccaggatgtgcgtcgcaaaatcgatctcaaggtcatcgaggtcaatcgcgaacgagctgaattctttagccaagaattccctgacctctatgtcgtccatggagacggaaccgctaaagacattcttttagaagagagtgccaataactttgatgctgtggctactttgacaggggtcgatgaagaaaacatcatcacctccatgttcttggattctgtcggagtcaaaaagaacattaccaaggtcaaccgaactagtctgttggagatcattggcgatcaggatatgaccagtattgtcactccaaaacgcatcgctgtagacaccattatgcactttattcgcgggcgctacaatgcacaattttcaaacctagaagccttgcaccatgtcgcaaacggccggattgaaaccttgcagtttcaaattaaggaagacaacaaactaacccaatatcccctctctgaattgaaattgaagaagggcgttttgatcgctgccattattcgaaacggcaaggctattttccctaatggggatgaccgtttgatggtcggggatcggattatcgtgaccaccttgattcaaaatgtcactaaaatctacgatctacttgagaggtaagcctgatgaatagaagcatgattcgttacctcttatccaaactcctcttaatcgaggcaggtctcctaatcgttcccctagtggtcgctgcaatctatcgggaacctgccaagatctttgtctctattggagcaaccatggccatcctacttgcgtttggcctccttggtagttttcacaaacctaaggattttcacatctatgctaaggaaggagtcctgattgtagcactttgttggatcctatggtccttctttggtgcccttccctttgtcttttcgggccaaattccaaacattatcgatgccttctttgaagtcagctctggctttacaacaacaggggcaacgatattagatgatgtgggtgtcctcacccattctctcctcttttggcgcagtttcacccacttgattggggggatgggagtattggtcttcgcccttgcaattatggacaataacaagaacagccaccttgaagtcatgaaggcagaagttcctggtccagtttttgggaaggtcgtttccaaattaaaaaacacagctcaaatcctctacttcttgtacttgggcttgttcttcctctttgtggttctttatttccttgctggtatgcccctttatgatagttttgtcatcgccatgggaacggctggaaccgggggctttaccgtttttaacgacggaattgcccactacaatagtagtttaatcacctatttggtcagtatcggggttttagtcttcggggttaactttaacctctactacttcctcatgatccgaaaattcaaggccttctttaaagatgaggaattgcggacctatatcaccatcgtcctcgtgtccagtgtcttgatcgcgtacaatgtccttcatctctatgccaatgtcgctaagagttttgagatttccttcttccaagtgtccaatatcatcaccaccaccggttttggttatggaacgacggaaaaatggcctctcttttctcagttcatcctcttgatgctgatggtcatcggtgggtctgctggctcgaccgctggggggttaaaagtcattcggtgcttgaccttgtggcgaatcgcaaaaaatcaggttctttcgaccttgtctccaaatcgcgttttgaccttgcatgtcaacgatacgatactcgataaggatacccaacatcagatcctcaagtactttacaatatacagttttattacgatcggcttactctttgtagtgagtctagacaacaataacttcatgacggttgtcagtgctgtctttagttgtttcaacaatattggacctatgattggtacgggtcaaaccttctccatctttagtccgatttcaaaactgttactttccttagccatgattgccggacggcttgaaatctatccaatgattctgctcttcctgcctaaaacatggtctaaacgttgataaaacgagagtgttataaaaaaatgaggctgggacaaaagtcctagcctcttaattgtttttggattgtcgagcaagacgcagtggttgagtgggctctacaacgctgatttcatcagcttttacagccctactcaactgtgcggaggtgggacaacgaaatcgaattctaacgaattaccgatttctgtcccactctcatttctgtttatttgtgatcgtcctactttgattcttcatttcgtctcagactaaagtggtctggcagagggtctggtcccgcttgggtaccaggatggcatcgcaagattctcgcaacccccatcaagacacctttcacaccaaagcgttcaatcgcttggatcatataattggaacaggtcggttgaaagcgacaagaaggcggaaatatgggagagatccatttttgatagcctctgaccataacaatcaggatttttttcatgattttttagatttagtcactgctagattgtgcaactggctaatttcttttttgttcaagcgacggtattcacccggacgaagtcctgagacatctaggtttccaaactgggttcgggagagtttgtccactaaaagtcctacagcttcaaacatctttttgacctggtggttgcgcccttcatgaatggtcaactgaaccactgaacggttcttttcaacatccacttttaagatctcgtaagtcgctggcttggttttcttgccatcaatggtcacccctcgtgttaagggacgcaagttttccttattggcaatccctttgacacgcgccacatagaccttatcaatctcattacgtgggtgaatcatctcatctgtaaaatcaccatcattggtcaaaatcaagacaccagatgtatcccagtccaaacgtcctactggatagatgcgctctggcacttgagataaaaggtcaacgactgttgtccgccctttatcatcagatacactagagatgacgccacgtggcttatttaaaagatagtagaccttttcttcgttatagattggagtcccctctacttcaacctgatcaccggtcttaataatggtcgctaattcacgcacaacttggccatttactgtaaccaagccttgcttgatcagttcttcggccttgcgacgactagccacgcctgcatgggcaatatatttgttaattctcatctagttcctctgttctctctgaaaataattgaccttcctctggatcgatgtccacttcctcaacctttggtaattcctccaaatgattgatccccatataatccaaaaaatactccgtcgtgacatacaaattggggcgcccgaggacttcttttttcccatcctctcggatcagatcaaatgacagtagtttggtaatggcaccgctggaattgacaccccgaatatcatcgacctccacacgggtgattggttgcttataagcaatgattgataaggtttcgagggcagcccgagacaaactttgattcatgggcgttctagaatagtctcgtaaaaccgaagcgtagtctgcctttgtcaccaatttataacgggaagctgtctccatcaaacacagactagtatctgtgtcctcttggtatttttggcttaatttttctaaactttgcaccacacctgtcggaggtaaagagagaaggtctgcgatttgtctggcagtaattccttcttcacccgctacgaataagagtgcttcaatttcagctaatttgctcatgttcaatcctatttaagtaaatttctccaaaagccctatcctggatcaccgttacttcttgaatcttgatcaattcaagggttgcaagaaatagagtaatgacctcttggagatccgttgcttctagaaacaagtcctgcaagagaacttgtgagcgatcgtggaatcggtgacgcagctggtccatcagatcctcaatcttgtattcatcctttacaatggttgtatggttctggcggaattcttcttttttcttggtcaatagttttgagaaagccaagaagagatccaccgtggtgcgatcatgaagtaattcggtatcgtcataaatcaattccatctttggttttgaataatagagggcgcgctcctcgtgctgtgaggccatcaactctcctaattgcttgtaagtacggtactcttccaattgagaaaggaggtcctgctcaagatcctctgcttcatccatctcctctgcaaccttaggaagaagtcttcgactcttgatcaaggttagttgactagccatcagcatgtattctcctgctacctctagtttcatagcctggagggtcgccagataagccagatactgttcgatcacctcaatcaaggggacctcataaatatccatctggtatttagagaccaagtgaagcaagaggtccaaaggcccttcaaaatctttaattttaatatccattatttatatttttctaatgtcaccatggtttttaggcccaattcacgcgcaatactaaaaagatccacaccgagttcacgttgtttcaaaatatactgctcacgaatcgattgtgccgaaaggtcttgattccctttttcgatcaagaaggcttctaattgtcggaatccccactgacgggagtatgattttcctttattatcaaagagataaataccatcgaggaagagttgcaactcatccagtaacggctttggaacctttaaaatccgtttttggccatctttgcccacccgaatgacatgaaagtccagctgaatatcttcgaccttgacttggaggatctcacttggcaataagcccatctccagaatcaacaaggccatcaagcgtccctgtgggttagttgattcttcccaaaaatgggtcagatccaacaattcccgatcatgggtcttggccggttgaattttaggcaataccaaacgatggtattcagaaataaagcgttcttgatacaaataatataaaaattggttgacggcagataattttcgtttttgaaccgccggtttaaaatctttaatcgaagcttggtaaattctcaaatttgtcggtgtcacttttccatggatcgactcaataaattggtccaaatcatagaaataggcagactgagaattttcacttaattctttttgatcaataaaacttgcaataaattctttcattttggaatcatctcgtattcatttgaaaaatcatgcattagcgaattgatggctttaagaatcgatttccgtgtaataatcccttggaaataaccttcttcatccaccactgataagaaggagtcatccaccaacttgtgaaggacttctgtcaaattgaagtctaagccgatgaccccaacctccttctttgcaacgtctacgatatccatcgaggcaaaagtctcctcaggaatctcgtgtttcaattgataagatagaatatctgttagggagatcgtccccacaaacttgcgttcatccgtcactaccggaatacgactatagctaatctggctcaacaacaggacagcatggtctacattgtggttatcaatcaagaccgctaaatttttggctggagttaagaacgtctcttcttgcgccagcaagaaacgttcaaattcctttgctatcatctgctaaactcctttgtcaattcaggatacaactcatgatctcgcgtataatactctaccttgaagttagaatcatctatctcaattttagcatagagacactctcgaatcagaccgcgtggctgactgatcgatccaggattcacaaagagggttcttccttccttccaagcatctgggatatgaaggtggccgtaaagacagatatctgcttcttcctcttgggcccacagatccaatttttgaaaactaaaattgatctggaagagatgcccatgggtctggatgattcgtgttggccctagttgggtcaccaagcgttccggatagccatcataaaaatccatatttccttggacaacgtggatcccttcccagacaggatcatcactttttagttcagaatccccattgtgaaagatcccatcgacctgacctaggtatttttctttaatagcttcaacaatggagcggtctccatgcgagtcactcataacgatgattgtttgctttgccatgatggaaatacctccaataactttttaacagctaaagcacgatgtgattgtgtatttttttcttctagcgttaattcagcagcagcacggcccgtttccccaactaagaagagaggatcatagccaaaaccgtgttcccctttgggctcaaaattaatatatcctggccaatctgcttccaccactaggctttccttgcctggtcttgcaaccaccaaggtcgtatggaactgggctgaacggtctttcaagtcaaagaccatggctaattcgtgcaacaatttcgcattattctctgcatctgtcgcaccaactcccgcaaagcgagctgaccaaacccctggtaagccacccaagatatctaccttcaaacctgaatcatccgctaagactgttttcccagttagctctgcaatggtttcagcttttaggcgggcattctcttcaaaggtcagacctgtttcttcgacttctggaagctctgggtattgattgagattttccacttcaaagcccagcttttcaaacatattacggaattctttggtttttccctcatttcgagtcgcaatgagaatcgtatctttgaccttgtcttgacccaagaaggcttccaaatccagcccatcacttggcaaatgcaagtaaagcaatttccctttttcaaccaagagcaaggctccttgacgctgtacgatttcaaaagctcttcccttgacttcattcaagatttcagtcaaaaaggtcagaaaacgaaaggctgaaccatagcgcatcaccgatagattgagaggaaatccctcaggatccttggcaaagagaagttccagctgatctaacagagtggaagcttccgcaggcacttgactaaattggttgtagtctgcatcttctccccattgggcaatataccaatcctggggatctttgtattcaaatagtttgtcactcataaatttacatgctccacattcactgaacgttctagccatttttcggcaatcgctgcaaagctattagcatttgcagtggtataaaagcggtgggtctgctctaagagttcccgactcttattgagctcaaaatagtttaataaaacggaaatatcccgaacacactctgccccactatcaatcaatttgacatccggccccatcacattttgaatgatcggttttaaaaggggataatgggtgcatcccaagactaaggtatcaacctttccaactagtggttttagggtttcgtaaaccacctttttggtcacactggatgccaactcgtttgattccactaaaggaacaaacttgggacaagctaaactgctgacttccatgtctggtgccagactttgaatcttctctttataaattccagaagaaaccgtcatcggtgtcccaatgaccccaattttttgatgggtcgtcgatttaatggctgcagaagctccgggcaaaatcactcctaaaacaggaatatcaagtttctccttgacttcttcccaaacaactgccgtcgctgtattacaggctaagacaatcatcttgacatttttggtcagaaggaagttcaccatctgccaagtatactcgcgaatttggtctgctggtctaggaccataaggtgcacgtgctgaatctccaatatagacgacatcttcgtgaggaagctgacggagcaattcgcggacaacagttaggccccctactccagaatctaaaaaaccaatcggtcggttatccatatctcttccttccaaaaggagggactaagaaattcctccaagcccctctcatttattatcgtgagattgccccactcttattttttcttgtttttcgccattgctgatttttgttggctcacaatttggcgatagacttgttgaacttttgcttcgcttgggcgttggccgctcgctcctaaaagcgtacgaactgcttcaacattcaaacgtgggtttgatgcaaattctttttcaaattgacgacgaagcaagaacattcctgcaatcatcccaccaaagaaagctaaaataatcaacaaaattcctaaaaagagattcataaaattttctccgatccattatttttacataactatcattatatcagacaatcgcttatttttcaatgtcaaagccgtagagtgtcgcaagataatcttctggtttttctgctcgacgaatcaaacgggcctgcccatcttcttgaagcaaaacttctgccgaacgcaacttggcattgtactggtaccccattgaaaatccatgggctccagtgtcatggatcacgagcaaatctccaatctccgtcacgggtaattctctttgtttggcaaatttatcgttattttcacagagacttcccacgacatcaaccacttcagttggttcctctggacgatccatattggtaatatggtgataagcaccgtacatagccggtctgagaagattcacagctgaagcatcgacgcccacataggtccggtaggttttctttttatgagtgactctggttaccaagaggccgtgtgcagccagcataaagcgaccaagctcggtatagattttcacatgaccaagtcctgccggtttgagaatctcatcaaaaacgctatgcacaccttccccaataatggcaatatcatttggttcttgttctggcttgtaattgaccccaactccaccagagaggttgatgaagcccaagtggacacctgttttctcgacgacttccactgccaattcaaaaagttgacgcgctagctctggatagtagtcgttggatactgtattagaagctaataaagcgtgaatgccaaactcttccacacccagttctttcaactcgataaaggcttggatcaattgctccttggtcattccaaacttggcttcttccggattgtccataatatcggttcccagttcaaaaactccaccaggattatagcggcaagaaataaccttgggaatgctagtcacagacttcaagaaagcaatgtcttcataggcatccagattgatcgttgcccctaattctctagcatagacaaattcatcagctggcgtgttgttagaagaaaacatgatttcttttccactaaagcccagtttatccgccattaacaattcgacatagctggcagtgtcgacaccacagccctcttcttgcaaaatttttaggatcgatgggttaggagtcgccttgatggcaaagtattctttaaaaccttcattccaagcaaaagcttgatggagagcacgagccgtttcacgaattcctgcttcatcatagagatggaaaggggtaggaaattcttgggtcagactttctaattgttcacgggttacaaaaggtgttttcataatcgctcatttctattctttagtcactattagtatagcacaagtcggaagacaaaaaaagctgaggcaactgccccagctcaatctctctttgattagtcgtttcttccgaagatacgaagaaggctgataaagaggttgataaagtcaagataaagttccaaagccattgctactgcccagcctgtagcaggttgaccatttgtttgatcatagacatagcgaatcttttggttatcccaagctgtcaatcctgcaaagaggaagacagagataatactcaagatatagtccattccagaacttctcaagaacatgttcacaacagaagcaatgatcacaccgatcaagactcccatcaaggcacgtcccattccagacaggtcttttttcacgacgcgtccgatagctcccatgacaataaacatcaaggcactgaccaagaaagccttatagacagttgcttgcatgtagcgagcaatgataaagctcaaggtaaagccattcaaagctgagtagatcaagaagatcggaagagcagacgggctatttttaacagccttcccacttgcaacaaagaccaagatcaattctacaaccactgctgcgtagtaaaccattggtgcggttgtcaagatttgtacgaagaagtcttgaaagactgtcatcatcaggccagacacaagggctgaaatccccacaccgatcccaactaatgagtagattttgttataaaaagcattcaatccactttgttcttggattactgaatcattatacatattaacaagttcctttcaaatttgtttactacgattttaacatttttcgatgaaaaaatctccttttagccatctttttacgccatggttctgaagcttctttaacagcccagtatttatccaccatggtcactacgaaggattctttgtagcgaggcggagcaagggtagccccccacatgtgtttaatgatgatatcttcttccttagcattaagatctgtaatctttcgcgcatttctcacggcaatgcgtggatgaatccaggcgtgactcttggtaaacttggtctcgcgccaatcatagtaaaagaggtcatgcaagaggccaccccgagccgtacttttagcatcccagccaaattttttagccagtttataactagtatagctaacatgaatggaatgctccaaacgattggaatgaatatgatgggggatgtcggctaatttttgaaccttagggtgctgaatcaactgtcccacataggtcatgtattctttgtcacgatgatattgcatcagatcaccacctttccttgataggctctcccaataagatttccaccaatttcttttttcaacttaagtatactgctttttctcaaaaattccttaaatgaaacatcaaaattccagcagctactgcaacattcaaactctcagcccgacccggcatggtaatatgaacaagctggtcggctcgtgtagccatttctggactgatgcccttgccttcattgcccataaccaggataaactgattagtctgtggaagctgacggtaattgatggaagcttctgatagcgtcgttgcgaggaccgctagattggattgactagctcgttcaaacagttcttctcggtccattttccagataggaagatggaaatgactgccctgcatggatcgaagagtcttgagactgtatagatctgcggatgctttcgaaagcatgacaccatcaaagccggctgcatctgctgttcgaatcatggttcccacattacctggatcttggacatcctccaaatagaggtaacgaccttgtaacggatctggaagttctggctgctctataagaatctctgcgacaattccttgaggggtcttcgaatcagccaagagactcaagatctccgaagtcacgacagtgacgttttggatattctctacccggtctaaataggcttctaaaacaaagatctgacgaatctccgcctgattttctactgcctcttcaaagagatgccaaccttcaatgagataggaatctgtccgatattttttttgatgtaattttttagcatttttgattacattattggatttagacgttataatattcatagacctattatagcacaaagaaaaagaagaaatcatgcctcagatagatttcttcgagtcaaggaggatgcacatgcaaaaggtaaaaatgattgcccaaggacgggttcaaggagttggttttcgctggggagtctacagtcttgccttggagattggtgggatcactggccgtgtctggaataatgacgatgggacggttggtattctagctcaggcagagtctagcagtcaaatggccaaattcatccaagaaatacgcaaaggtcctacgccgtttgcgcatgtgacttatttggatgttacgttagcaaactttgaaaactataaggacttcaaaattgcaaattaagactagagaactattgtgtattttcaaaaaaaacagtagaatagaaaggtaacattttaaaaaagaaggaacgatttgtgaaaaaaaataaacttgcattattggcatcgatgggactagcttcgctcgtcttcttatcaggatgcgtgagtgtcgatcggaaaactggaaatccaactggattgatttggaatcttcttggccgtccaatgggcgaagccatcaaattctttgctaataaccttggcttgggctttgggatcgggattattatcgtcaccttgatcgtgcgtttaatcatcttgccacttggtttgtaccaatcatggaaggcaacctaccaatctgaaaagatgaactacttaaaaccaatccttggcccaatccaagagcgcatgaaaaacgctagcacacaagaagaaaagctattggcacaacaagaattaatggctgctcaacgtgaaaatggggttagcatgtttggtggagttggatgtttaccactcttgatccaaatgccattcttctctgccctcttctttgcagctcagcacaccaaaggggtagcagaaagtagtttccttggtattgctcttggaaaaccaagcttgctcttgacggctatcgtagcggttctctactatatccaaagtatgctctctcttcatgggattgaagatgaaacccaaaaggaaagtatgcgtaaagcatcactgatgagcccgattatgatcggtgtcttctcattgatctcttcagccggagtgactctttactgggtagtcggtggggtgatccaaattatccaacaatttgtcatcaactacttgattcgtccaaatcttcgcaagcgggtcgctgaggaatacaaaaacaatcctccaaaagcgactagtcaccgtgtgaaaaaagacgttacaccaactgcaacgacacaaattcaacacaaaccaaaaaacaaccgcaatgcaggaaaacaacgcaatagaaagtagtacaaacttctaaattctagcggaattacttaagcacctgaaccctctagttcaggtgcttttttaatccctttcaatcaatcaacgaaaaatttacaccctaacaaggggattaagaacacaaaaaaaacaagccctcttggagggcttgcgttttatagttacgctgttttttctacgttcaaaattttcacttggtagcttccagctggtgtctcaacagtgacaacgtcacctgtcttcttaccaatcaatgcgtgaccgattgggctttcgttcgagatcttccctgcaaaggcatctgcccctgctgaaccgacgatgctgtatacttcttcatctgtttcgccaacttcttggactgtaacggtttttccgatcgctacttcgtctactgcaacagcgtcactatcgacgatttccgcataacggatttttgtttccaaactagagatttgaccttccacaaaagcttgttcatcttttgctgcttcgtactcagagttttctgagaggtcaccgtatgagcgagcgatcttgatccgttctacgacttcaggtcgacggaccaatttcaattcttctaattctagttctaatttttctttttctgctagggtcattgggtatgttttttctgccattattcttctctttctattatttgaatgaaaaagctgtggacgcgccacatgctttttctagtttgaacttgcttgtgtcaatttactattgacgtgttcttctacatttttattgtgttcttcgtatgtcttagcgaagaagacttcaccattttcgacatttgcgacaaaatacaagtagtctgtcttacttgggttcaccgccgcttcgatcgctgatactccagggttatccactggaccaggcatcaaaccggtattcttataaatattataaggtgaatccagctctgtatcgatcgttgcatcttctttcaaggtcgtcttttgaccaagcttcccttcggcataaagaattgcaatattactttgcaaaggcatgtcttggttcaaacggttatagaagacacttgcgatgtctttgcggtcttgatccgtcgccccttctttttcaaccaaggaagcaagggtcaatacttcgtttacattgatgttcttgctctcaagtgtttcataatacggggttaagttttgatccatggccgccagcatctgatcgatcatttctttcactgtggtatctttcccatagttataagttgctgggaaaagataaccttccaaacggtagcgaacaccagaatctttacttggcaggttagccaagagcttaggatatttggccaccatcttctcaataaaggcatcatcttggacagccttcaagaaatcttctttcttaaatggagtctttcctgccttcttactagagacatctgctgtgatagccgtcgcaatctgatcaatggtatagccttctggaatcgtcacctttccaagaactggagcctgaggagttttggtcccctcttcctgcagtttttggatgatggtttctaaatccatgctcttttgaaggttgaaataaccggatttaaaattgctatagttcttgaacttggtatagtagttaaagaactgaccatttttcacgagtccttttttctcaaggatcgcgccaatctcacgattacttgaacctgctggaatctcaaccgtcacgaattctgttgcatttttatccatcggcttgacagctgaatggatataggtcactgcaaagatccctgtagccacgatcacaatcagcaaaaggctgaccactgtccgcacaattcgcttagcgattttattttgtttcttttgtttttgttggcgctggttacgagaagagcgcgataagctttcctctaccggttcctgacttggttcttttggagcaggctttgtgagctcactcttttcttctacagcaggagtcgccttttctggctccactggtatttctgtggaagccacaacagcttcttcttttggaggtggtgttgcttcttcctcctctttcagtgaagaaggggtttcaatgcttcgatcaggtagatcatactctttttcgatctttagaagttgctcatttgcctcttctaagtctctgaggatctgctctttgaagcttaataacttctcactgtcttgtgatttatcagtcaaataattgacctccctcatcataatccttaatattatatcttaaaagatttagaaaagcaatacaaatcgcccttcttcttcaaaatacctatttaatcaaggttttcattttcccagaccagattgtaccaaacctcacccgcatattgggattctgaaagaccttcattggtaaatccttgcttttcgtaataaggaatcaaataatcatgacaggtcaaattgatcccttgacggtcctccttaatcgcgatctctttcatcgcttcaagcaagagggttcctactccaagtccttgggcttctttggcaatggatagactcgtaatggaaataaaaccctgttctagatggcttagatcttcaacctttgaaaaagaggaatcgatcaaatagcgctccggtctaacaggtccttctaagtaccctaaaatctgaccttcgcactctgctacaagaaaagtcgcttgaatcttttcaatgtgatcttttaaaatctcacgcgcaatcgcttcttcttctgagaaattctcaagctcaatgcgctcgatggcatccaaatcctgtagctctgcttgtctaatgtgaattttttctttcatcatttactctttctatcgttcccaaaccatatggacaccccgatcagactcagcttcatctcgaaatccttgctgggcaaagtaagaaagtaaatcttctgaacaatcgatccaaatggcttccttttccttttgaacagctacatcttttaaagcagcgatcagaatcgcaccatatccttgaccttgaaaggctggcctcactgctaatcgcaatacgatgaggtccccctttaaatgatggtcttctgtcgccaacaagtaagccacagtatcgccaacctgctctgcaagcaaagaaatggcttccttcgaacctagcgcttcctcaagagtggccctgtgctcttttccttcattgtcatgaagttcttcttctagcaataacagttgttcttgatcagccggggtgatttgtcgaatcatcatcctgctctcctcatttcatgattcttcagcggacagataaatttgagtccagaaccaatcgattccagactcaatcatctctttattgtacactatgtgtcaaactagataataaacgctcaaatgagtattcataggtttgaatatctccagctcccataaagacatagaccgcattgtcatggtcaagaagaggagaaacattctcagctgtaataatcgctgaacgtttgacaatttttgcttccaaatcttcaaccttcacatctccgtgatcgacttcccgtgcagaaccatagatctgtgccaagtaaacagcatctgcttgattcaacgcttcagcaaattcatctaagagggcaatggtccgtgtaaatgtgtgtggttggaaaatggctacgatttctttacttggatatttttgacgagccgcatccaaggtagcaataatttctgttggatgatgcgcaaagtcatcgatgatcactgttccgttaaccactttttcagtaaaacggcgtttcactccagcaaaggtcttcaaatgctcgcggaccaaatttaagtcaaatcctgcaatatgaagcaagccaatgactgctgtagcattcatgatgttgtggcgaccaaaagttgggatatggaattgccccaagtcttctccacggaaatgaacattgaaggttgacccagtcgttgaacgaagcaaattgcttgctacaaaatcattattttctttgtcaaaaccatagtagtaaattggtgcaggtgagctaatccgacgcaattctttgtcttctccgtagatgaagaggcctttgctgatttgtttggcataatcgttaaaggcattaaagacatcttctaagctcgtgaaataatctggatggtcgaagtcaatattggtgatgatactgtattcaggatggtaaggcataaagtggcgttcatactcatctgattcaaatacaaagtatttggctgcttcagagccacgacctgtcccgtcaccaatcaaataactggtatcagtgatatttgataagacatgcgaaagcatccctgttgttgaggttttcccgtgtgctccggcaacccccatgctgacaaagtcacacataaattcaccaaggaattcatggtagcgtttataggttaggccatgctcatctgcataagcgatttccacattgttatctggacggaaagcattcccggcaatgaggatcttgtcgccttccaaatttttaacatcaaatggataaatttgaattcctgcttgttccaagccacgttgcgtaaagtaatacttctcaacatctgacccttgaacagtatgtcccatttggtgaagcatgagggctaaagcactcatccctgctcctttaattccaataaaatggtatgtgttagacatgttttctccttattcttgatctagatgggttaaatccaattcttgtttgattggctgtggtttcaacttgtgttgatctttattgtatatttggctagtctttaagaaatcataattgtttttcttttcagtcggttctgccacttctggttctcctgcagattcgaactctgcaaggatcaactgatcttgtcgcaatcgtttgctatatttcaataattcacccggattttccttttggaagggagctgttggctggccaggtttccgttctgaaacaaacggttttttccgcttacttgtagtagctgctggatccgttgtcagatagggagctgtacgtttctttttcagatcttcacgcgcacgctctctagcttcctctgcataacgattggcagggctttttttatcaatcggctctttaaaatcaggttttcttactggccgtcttttcggtaggggctcttctagtggttgatggtaaggatgcttaggtttggtattttcagcaatcggttgccattccaaataatttttatccacatagtcgcctgtaatgttactaatcaagtctgtttcatcatacaggttcatgtggggcatctctgttaacatcaactcattatcccctacttgaggaaaatatttttctgtcatgctttcttcctttcgacactccattaattataaactattcacagaatttttcaagctattctgactgaattccaagaatctcacgaatttcctcaaccgataaactagatcgtgtttccgttccgtctaaaatcgttgagaccaagtgtcttttggaagcttgtagttcttggattttttcttcgatcgtaccacgagtaatcatgcggtaaacttcaacattttgttcctgtcccattcgatgggcacgtccaatagcctggtcttccactgcaggattccaccacaaatcgactaagatgaccgtatcggcaccagtgaggttcaatccaacccctccagccttcagagaaatgagaaaagcatggcgctcacctgcattaaaagcattggtcatttcttgtcgatctttagcgggagtagaacctgtgattttaaaggaggtcatgccaagctggtcaatctcctgctctaggatatccagcatgcctctaaattgagagaagatcaaaacccggtgttcgccatccttgatttgacccaaaagatctcgaaggctctccaatttcccactatctccctgatagtcttccataaagagggcgggggtatcacagatttggcgaaggcgcatgagacccgagagaatttccaccttactccgatttagttcttcctcgctagagcttcgaacccgatcttgaatttgttttaattgagccaaatagatcgttttttggctttcatccaactcattgtggtaggttgtttcaattaagtccggtaattcttggagcacttcatcttttttccgtctcatgacaaaaggtttgacaaatcgtgcaatggtctcaggactcaatttttgaaattctcttttagctgggaagagccctggaaggacaatttggaaaatggaccagagttcacccacatgattttcaatcggtgtcccagatagggcaaacacatgcggaacctcaaagccacgtaagtgttgggcaatcttggtttgggcatttttcatgacctgggcttcatctagaattaggtattcatattgatttttctgatattcctccacatcctgacggaaagaggcgtaactcgtaatgactacctgaggattggttgcgatgagttcatctcggtgctgcttgagaccatagacgactgccacttccatctgaggagcgaattttgaaaattcttgtttccaattgtagatgagactagatggagctagaatcaagattttagtttctttttttgcgacactggtcaagaaggaaatagtctgcagggttttcccaagccccatatcatccgctaaaataccaccaaaaccataatgatttaacatggagaaccatttaacccctgtttcttggtaatcccttagggtcgcttggattgtcatctgagggagttggaagtcttctggatgagtcaaatcatgagctaaatttcgaaagtcttctgaaaaatgaacattgtcttgatctgccaacaaatcagatagctgataagcggcaatccggcgggcttgtagtttcccacccttgctcattttcgcccgcagatctgctaaggctcgactgatcttcttggtttcttcatcaaagacaagaactttccctgtatggctgacaaaatagtctttttgccctactagagctttgaggacctggtccacttcggctggatccacactttcaaagtcaaaaccgatctccagtagactgccattggttttaacatcaatttttggacgctccacttgataaagatctaaaaggctatcagagagggtaacctctcctaaggcttcaaaagtcgggatctgttggtgaaagaatggatagatttgctcacttgataaaggacttctttgggaagaaaaatcatccgtaaaacctgctgctagcatggttgaaaagacttcttgctccttatcgaaatcactagaataaggaagattgagaagttcctcacgcgtggtcaccacacgatcctggtattgaaagacaacatccagtaatacagtctgatcctgtgctagatcaaaatgaaattccggagtgaaatcgtggattaaaaagctggtcggggctgttatttgtcccagttttttgaactcttttagactataggaaagtttggtctgatccgttggatcaaaatgcaggcgttttttgcgatcctgatccattggaagatcttggatggccttccatagggttcgctgttggggcgtcaggtgatagaagacaccatttcgaaacaggtaaacagccgactcgacaaccttcacttgtggctccgtaatgatcaattcgtaaaaatcaccatggtcttccacctgaaaatgaaagagatcttcctccccatggacatcctgaaaatagacttcagaaaaatcatacaagctgtattgcaagaggaaagaatccaaattcatcagtaattctacagcttcttcaaagagagtcggtggaaaataaagatggcgcccagcattgggaaagaaatcttgctctttcgagccactatctgtgaccaagccttgtaggaaattgatcacatcctgactaggcccatcaaattctaaataagaaatgggttcatagtaacttttgccaattgcaaagtggccttctttttgaagggtctgcaaaaaagctagcacatctctgatcacataagaacgctcgtctggcaagcgacgaatgcgaagggtccacaagaattgaccagagtattcatcctcctgcccgactgctgataagacataacgtgttgctttcttttcgatttttggaagaacctggtctaaaaacaaacttccaaaagagaccttctcctgcgtttcttcagtcgccgtggcgtcttcttcaagacttgcaagagctgctttcccactgtcatcattcttcaaaaaagcttccacagctgccagatgcgtacagaattttttcttttgaaagaaagcacagctacaaaaaacagcatcgtcgtccaaactgtaccgcaagctttcttcttccacccgaaaatataggtatttttcttttacttcctgaagggaaaccttcccagcttcatagagaaggctcccttgtgaacgaaccttcccaggaattaattttgccatttttaccaccttagattaatccctttattataccatatttaagataaaattagaaaagataattttactattaaaaggattttaacttacttttagaaaaaaactgagacagtcttgtcccagcttttcacctgatttcgtaatagagttacctcaatcagctatccatgatttttctcttttaaccgtctgagcgaacaatagacagaatagctaaatagagaggagaaagatcccgatagcccacaaaaaatacgacctattttttaataaatccccaacaataggatcaagagctccaagcttacgatcgaaccgagaaacaagagatacagatagattttaaataataagtacacaaacctaaagctctcatgatcttcatgagtttactcttctcaaccttaaaaaaagctaaggaataaagcatatccggactatgatactacgcatctgactatcctccacttcattttaccagcttattaaaaaaagcaacgcttatgcgctacttttagttgttttcatagttggaagaatgagcattttatcatttgaaatatccttctccactttgatccatttgtctcgtattccctacttccgttttcgcgcaatcaaatggattggagttccttcaaaaacaaaggccttgcgaatttggttctccaagaaacggaggtatgagaagtgcatcagttcttcttcgttaacaaagaccacaaaagttggcggcttggttgccacttgtgtcgcatagaagatcttgaggcgttttcctttgtcggtcggcgttggattaatggcaatggcatccataatcacatcgttcaagacagctgaaggaatccgcgtattttgactctcactgatctgtttaatcatctctggcaacttgtgcaagcgttgtttagttagggcagaaacaaagacaatcggagcataagaaaggtattggaattgatcccgaatgtcatcttcccactgcttcatggtatggttgtctttttcaatggtatcccatttgttgacaacaatgatcatacctttaccagcttcatgagcaaagccagcgatccgcttatcatactcccgaatcccttcttcggcattaatgaccatcaaaaccacatctgaacggtcgatggcacgcatggcacgcatgacagaatatttctcagtgttttcatagattttaccagatttgcgcataccagctgtatcgatcatggtaaattcttggccatctgcatcggtaaaatgggtatcgatggcatcccgtgtggttccagctactgggctcgcaatcacgcggtcttctccaaggatggcattgatcaagcttgatttcccaacattcgggcggccaatcaagctaaatttgatgatatctggattttcttcttctgtgtcattcggaagattttcgatgatggcatcgagcacatccccagttccgatcccgtggacagaggataccggtagtggctcacccagtcctaaggcataaaagtcatagatatcattgcgcatctctgggttatccaccttgttgactgcaagaatgaccggtttatgagtcttatacaagatacgagtgacatattcatccgcatccgtgatcccttcttttccagaaacgacaaagacgatcacatctgcttcgtccatggcaatttctgcctgatgcttgatttgctccataaatggagcgtccacgtcatcaattccccctgtatcaatgatactaaattttcggttcaaccactcagctgttgcataaatgcgatcacgagtgactccttctacatcctcaacgatggaaatccgctcaccggcaatccggttaaaaagtgtagattttccaacattgggacggcctacaatcgcaatagttggtagggccatgatttcctcttttctaaagataggcgagacctcgtttcaagaaggtctctcttcatttctataatagtttgtgtttttctagtagtttttgggtttcttcttgttcaggttgaccaaattgagctgccaggcgctcgctccagctgtctgttgcacgcgctccagcataatctgcctgaaccttgtcataggcagtcacaactgataggtcttgttcttggtattcttcttcaaaagcaacctgctccaatggcaaacgtggtttcactgcatgctgctgattaggtactccgagagcaatcccaaaaaccggataggtatagtctggcagacggaagagttctgcgacttcttctgaacagtagcgcaacatgccgatcatcactccaccatagccgagactttcagctgccaatagcgtattttgagctgctagagccgcatccactgaggtgatcagtaagttgtccaccccttcaggatggaaatcctgctcatgaagtttgacagcttttccagcgcggtttaaatccccaacaaagaggagaaagacggctgattggcgaatcgcttcttgaggaagaaagtcgtaaagagcttctttcttttccttgcttttgaccacaatcacagaataagactgaaagtttttccaacttgatgccatctgcccagctgataaaatttccttgaggtcagcttctttgatggcttcttccttaaaacggcgaacagaaaaatgagatttcattaaacggatggtttcattcatcggcgattgactccttccagatggatttccttggctaaaaatttcacgcgctccatgacccgtttggcctgccaggtttcatctccattacgcgaagctgcaaaatgacgttccaactcttcaaaattaaagttagaagtaaagaaggttgggagattttcctgcattcggtgctgcaaaatcacttgtaagatttcatctcgcacccaggctgacatctgttccgcacctatatcatcgagaattaaaatttcggcttttttcacctgatcgacggtttctttgaccaagcctgaactgatggcatttttaacatcgatagcaaaacttggaaaatgaagtagggtagtagaggcctggcgtttttcggataaatcatgagccaaggctgccatcatgtagctctttcctactccgaaatcaccatagaggtagatccccttttgatattcaggatagttggccacaaaattagctaattcttcaaaggcctcaaatcgccccttatcatcgagttccaccttggctagactcgcttctttcaaggttgaagggagattgatcaagttgagacgttggttgatcgcagctcgtttttgggcttcgattaactctggcgtttcctcataagcgacatccgcatagccttcattcatggtgaggatgggcttataacctttggcaatataatccggatctcccaataagaaacggttgcgttcactaatgtattgattaaattttgaaatactccgtcgaatttcttgttcagacaaagactggtccttgataaaggcagccacttcttggtctgccaagatctgtgcgaccaaatcctcatagttaaattgacgcgcacggttcatgtgagacatggtttgacctacactttccatctactcacctccttgattcagtttttctaataggcgttgtttctctttagcaagatccaccttttctgcttgactggtttgattttgatagtttggttggctccacttgggaacattgctgttcttgcccttggctgatgtaggactcgtccccttgtttccttgagctttagcttgttcctggcgttctcgaacttttaaaatcgctagttctgcactgttgaccccttgataagaaaaatcatttcccaccttcaaagcatacttttcattgagattagcagactgggtcttgttaaaggtcaacaacaagataatattgatcacctcgtctagtaagcctagatcagctaacttggataatgtcttgcgttcgctctgcgtaatggtcgcattgcgcgccttcttaatctctgctagaaattgtaggctggattttgccttagcttccctcagaatggtttcttcctgacggctataggacatgcgtggttgctcttggctcgcctgagccaacttttgcttcattctctttggagagacaatccggtctacagctgtttctttcgctaaaagataagtttcataccaggtccattgttgctcttctgcgatggcaaagagggctagggttgcttctccttcatccacaaaacgaagtccatcacgccccatcattcgcttaaacatctccatatcaaactgctgtttcttacttggaagaacagtcacctccccagcatctagtccaaagacttgcgagaaggaaacttgccgtctagtccctaaagagcgtgctgggagcagatcctccacggccttttccccaatctttttttcaagcaagcgtttgaaaacagcattcgaaaaaaattgttctgaggcaagaggagcatgtaactggatggtgatcccaacttcttcctcatagagatcgatcaaccccatagcaattaagcgatcaaaggcgagtagcaactgtggaaatcctatatttaagtgattgaggatttgagcaagtaaatattgtttttcaccctgatcataagaggcgagcagataacgataaactgctactgtttccgtctccaaaataggcaggtaatactgctccaatgcagcccctgccggtggaagaagattattttttaaaaatgcgaaaggcgtattgggcttcatctatttttcctttttcttcttggttcccttcgtaatttgtttcaagagggtctctaactcaccgacatccttgaaactccggtaaacactagcaaaacggacataggtgatctcatctagatctgctaactcatccatgaccaacgaaccaatatattcactgttgatttcattatcactttggctgcgaaccttttgctcgatccggtttacaatttcttcgatttcgtcactagaaacaggccgtttttgagctgagcggataataccattaaagattttatcacgagaaaattgctcgcgtgtcccatcctttttgacgaccactagagtccgctcttccactcgttcgtaggtagtaaagcgataatggcactcttcgcattccctgcgacgacggatggtattcccatcttcagcttgtcgactatccaccacactagacttacttccaccacattttggacaacgcatttgctacctccttaaactgttttaacacttcattttaccataaattgaatcgtaaagaaagcagaagaacaggagaatcccctatgcttgctcctcattgatccataaaaaagagtcgaaggacgattgaataaaatcgttttcctttcgactctccatttatattaaagtgataattcggcttctaagccatagtgatcactgacatggggtttgttttgatcatcaaaaatgacatgtagacgctggatgtcccattctggacttgcaaagacgtaatcgattcgcaatggaacttgattatccgtccagccatcgattccaggacctacagtataagtcccctttgtttctttagcttcgataaagctgtcttgaagcttaagggaactggatagaatcgtctcatacccttcttgaccggcaggattattgaaatcaccagctagaataaagggtttgcctacttggctgaagtagttctcaatgcgtggccactcaaattggaaacctttgtcccaccaagaaagatggacgctggcaacagcaatctctttgccatctacacttgtatgggcaacggctactcgacgagtatggtagtccgttggatcatccatattggataccaaaatctcatccgccttcaagggttgacgcgaaagaacggccacaccctcattgaggtgatcatagccaatatggttataagcccaagtccaataatagtggagtccttgagcagctaactcttctaccaatacgcgaacaaagtgatctttgtgaatggctacagatgatggcaaggcttgataatactcatctgtttcgactgcttctgagcccatttcttgattgacctcttggaaacagatcacatcatattgcgcttccaaaatttgttccttgagggtttcaaatttttgctgagcattctcttccatccaactatgggaatttaatgttaaaaatttcatcccctgatttctccttctctccaaatcaagaaacggcaagaggccgggtgcactgccccaacctcattttctttgccgatgtcttttataattctactgttgcaactggcgcatttgctgccaatttaccagtatgttcgaccttaacggatttaatcgcatctgcatttgtgaagacaacaattgttgaagtttcacgaccagcttcacggatcgcatcaaggtctgcttctaccaagaggtctccagcagccactgtttgaccttcagaaactttaacctcaaatggttttccttcaagactaacagtatctagaccgatgtgaaccaagacttccaaaccattatctgttaccaaaccaagggcatgtttggttgggaagacgctagtaactttaccagcaactggtgaaacgatgtggccattttcaggctcaaccgcaaatccgtcacccatcattttttgtgagaatacaggatctttcacatcttcgatgttaatcacttcaccatctgcaacggaatgcacttcatcagttacccctttaaaggttgcttcagctttttgaactgctgtcatttggctaggaagtgtttcaggaatgacttcacctgaatcaagaacgtcttggatatcagatttcaacacgtcagctttaggtccgtagatcgcttggacaccttgtcctttcatgacaagacccatagcaccttcagctttccattgttcttctgttccgactttttcagcgtccttaacggttacacgaagacgagtcatacatgcgtcaacgtctacgatattggcacgtccaccaagaaggttgatgatgttaatgacttgtgagcttgctgagcttgtagcagcacctgctgctgcaccatctcccgcaggggcatcatcattttgttcatagttaccgttacgtcctggagttgcataattgaatttcttaatcatgaagttagcaatgaagtacatgataaaggcaaagaggactgttacccatacaaagttaaagatatctaatgccaaaccagcgttgatggccattggggtacgtgtcaaaaactcgattgaaccgaatgagtggacacgaaggtgaaccaagtcagccattgcaaaggcagctccttgaacaaaggcatagattaggtataaaggtgttgcaatgaacatgaacatgtattcaattggttcagtaacacctgtcaagaatgtagcaagggcagttgcaaaaagcatccctttgtatttttctttcttatctgggtccacattgcgatagatagcaaccacaacccccatcaagataccaaatgatccaatcatttgaccaactttgaaacgagctggtgtgtacgcatgaagcaagtgttggtattggctaggatctgccttcttcaagttaacaaggtctgttacccaagctaaccaaagtggatcttgtccaaatacagttgttcctttggcagcacctgtaagaacttggtagctaccacccaattgagtatagttgattggaatggtcaacatgtggtgaagaccaaacggcaagagaagacgttccaaggtaccaaacaagaatggtgccaatactggagctgttgattgtgagttggcgatccagacaccgaatccattgattcctgattgaaccactggccacaaggctgccaaaaccaaggctgtaagagctgaacgaacgataacaacgaatgggacaaagcgcttcccgttaaagaaagaaagggcttctggaagtttacggtagttatagtatttattgaaagcagttgctccaacaaaacctgagataatccctacaaacacccccatattaagtgccggtgcttcaaggacactaatgaagtagtctgcaactttaattgatccacctaagatcgtatgaacggtagcatccttatcggccaacattgcagatgtcactccgaaaactgcaccggtaatacggttaatcaagatgaaagagagaccagccgcaaaggcacccccagcacgctctttggcccagctaccaccgatagcgagtgcaaagaggatgtgaaggttaccgataaccccccaaccgatttgttcgagaatcccacctgtaataacaagtggagataaattcgggttgatcatagggattgatttcccgattgaaatcatcaacccagcagctggcatgacagcgataacgaccatcaaggccttaccaaacttctgccagaattcaaagctaaataaacttttgaatgatcctttattcatcattcaacctccttatattgtttaaggcttttgtttttaagaaaacgtttgcgcttaatttgcttctagtataccacattttaaaaatttgtaaagccttacattcattttttctccaaattttatctttttttatcttttttaagccaaatcctttttaaaacccatcctttttaaacgcaaacgtttcccttgaacataaaaacattcgaaccctttaaggattcgaatgtttcattctagttcgtcttgcatggcatagccaatcccacgaacggtcttaatatagcttttttgaccgggtagatcaattttcccacggagataacggatataaacgtcaacaatattggtctcccccgtactctcgtacttccagacactttccaacaactgatctcgtgtcaccacccctttgcttcccatcagagtcgctaagagatcatactctctgcgggttaaactaatcatgtctttcccacgatagacggtatggtgttccacatcaatgcgcaaattgcggtatgatgttgggattttcatctggctacaatgttggtcaatataatcacgtcctctaaaaatggctgtgatcttatctaccaaatcgctgataataaagggtttaaccatataggaaacggcaaagcgctgaatactctctttgtgctcagcaattttttcgcggctatccaacacaatcaaaacagaagctgggcgaatccgactgatttcctctgcgaatgtttcaccagacatatctgacaaatcgtaattaaacaagatcagatcatatttggtcgcagcaatcaaggccagacccgcttttccatcctcgaccacatcaacttgatacccttctttttgaagttccaaatcaatgaagcgcgcgatttgcttctcattttctactagtagaactcgtttgaccatagagcaagattatttttcgtcgtaccaagaatagtggaaggtaccttctttgtctttacgttggtatgtgtgagcaccaaagtagtcacgttgtgcttggatcaagttcgctggaagatccgctgaacggtagctatcgaagtaagtgatggctgctgagaaggttggtacaggtacacctgcttgaacagcaagagctacaatgtcacgaactgattgttggtacttagcagtgacatccaagaagtactcatccaatagaaggttagcaagatctgcatcgcgattgtaagcatctgtgatcttttgcaagaaacgagaacggatgatacatccatcgcgccagatagatgcgatgtctgcaaatggcaagttccagttgttttctttagaagcaacacgcaattgcgcaaaaccttgtgcgtaagagatgatttttgagaagtaaagggcttgacgaatcttttcgatcaactcagccttgtctccttcaaatttgaatgcagctggttttggaagaaccttgctagcatgtacacgttcttctttgtaggcagagatgtaacgggcaaatactgactcagtgatgagtgacaacggcacaccaaggtcaagcgctgattggctagtccatttaccagttcctttgtttcctgcagcgtccaagatgtagtctacgattggtccatcttgaccttcgtcgtctttgcgtttcaagatatccgcagtgatttcgatcaagtagctgtccaattcacccttgttccattcagtgaagatttcagccatgtcttctgcagaaagtccaagcaagtgttgcatgaggtcatagctttctgcgatcaattgcatatccccgtactcgatcccgttgtggaccattttcacgtagtgaccagctccatcaggaccgatgtaagtcacacatggttttccatcttcaggcgcttttgcagagatttcttcaagaacgtcagctaccaagtcatacgcttctttttgcccaccaggcatgattgaaggaccttcaagggcacctttttccccaccagatacaccagtaccaataaagttgattcctgagttcgccaattcttcattacgacggatggtatctttatagaaagtatttcctccgtcgatcaagatgtcacctttatccaagtgtggaagaagggcttggatagttgcgtctgtaccaggtcctgcttgaaccatgagcatgatacgacgtggtttttcgattgagtttacgaagctttcgatatcatagcttggcacaaagtttttatcagggtggcaagcaattacatcttctgttttttctttactacggttataaatggcaactgtgtagccacgagattcgatattaagggcaaggttacgacccattacggccataccaacaacaccaaagtttgctttagtcatgtgacactcctctttatagtttgcctttattctaccatttttcctcctcaaaagaaagcagaaaatagctccccgccttctccaagagggagaagatcatgcaagtcatttgatcttaaaaacaaaagtgcccgagaaacagttctcagacacttcttgatgaatggcattaatcttctttagaagctaactcctctgcttcaatgaccggttgttctccttctttgagtttattgaccgtcatattgaccccaagggctcctgctagcaattgacgaatatcaaatccagctccttgagagacttggtcgatactttgcataatatcgcccaccatcttagaagcattgccttccccgtacatggtgatcttatcaaccttggttaatggttcagcgacagcacgcgcaatttcaggcaacttgtcaacgaccatttcagtaatggctgcttcttgcattttcttcatagcttcggccttttggtccaaacctttggcttcggcttccagtttcaagcgaatggcttcagcctcggcacgacctttagcctcaatagcttcggcctcttgcaattgggcaaatttctcagcttcggcttgggcttttcgagcttcggcttctttttgtgtttcgaagagttctgcttccgccttgcgttggcgttcaatcaattctgcttctgcagcttgttgacgcgcatatttttcagcttcagcttgtttgcggatgttggcatccaattcttgctcacgaaccttaacttcgcgctctttgacttccgcttctttttcctgtttcatgatattagcttcggctgccacgcgctcttgttcacgacgttgcacctctgcctcaatccctttagcggcatccgcttttgcttgggcaatatctgcttcttgcttgagggctgcttgtttgagttttaattcgttttgtttttgcgcaatttcaagatcggctgcgacgcgtttgtcgttagccaatttatcttgttctgcttcaacttccttgcgttcacgttctgctttggctttggcaatcaaggcatctttcttaatggtttcaacattttcaatcccgaggttatcgatgactcccccttcatcagagaaggattgaaccgtaaaggcgatgacttctagacccatttttgccaagtctggtgctacgttgtcctgcacttttgaggcaaactcttgacggtcattgaccatcttacggagctccatctgaccgatcacttcccgcaagtttccttccaagacatcttggacagaattggaaatatctgtcgtattccagttcaagaagttttctgcagcccgggcaatcatttcatcggttgtaccgatttttaatttaacagctgcatcggcacggacgttaatgaagtccagtgttgggactgcttctgacgtccgaacatctgtcgagaattgctcaatatcaagataagagcgttgttcgacaaagggaatcataaagcctgctttcccacgcaagtgacgttgcttccgaagaccggtaatgaccacgacttcgttgggtttagcattgacataccctttgaccaacaagatcaatacaagaatggctacgattacaacagtaatcaaccaacctggaataaataaagtatccatactttttctccttttttagaggtctcccctctgttatttattaatcctagtatatcaaaagaaggcctttcctcaaagaaaagacctgtatttatgtctaaatttatcaaatgcaatctctagcttattcttcgtcaaacaagccatttagaccagcgaaaggactgttttcttctttcttgatcgcttgagcggcttggtattcttcttcggataggattttccaatcattgccttcaataaaaccttgtccagcctcttcttctggagtgagaaccttgagaggaatattgagcaggatattatccgctacgctttcactcaggtcaatcttcccaccttcgattggaaggatcaagtcttcctctagggcctcgatatctgcgtcagactgtacatcctccgcaaacacctctgttacaggatagctctcttgaagctcaacaggctccatgcttcggctagatgccaaaacgatggtataggtcaactggtaatccaagacatagaggcctgtatcataggctactcgtcctgtcgctgtcacattctttaaatcaagaatttctggattacgcttttgcaattctttgagcaaatccaactcttgatcaaaggctagtccttcaggatttttacggatttcttgtgtaaataggttcattcttttgtcctcaaatcttctagatactactagtatatcatgaagctgcccctcaaccaagaagtctcctcaaaaatttgttataatcatgaaaaaaggtacagtaactaggccaattggtgttgtacacaagggtcccaccatcttttggacaaaagagggtcactggctagggcattgttagatagaggagaattcatgaaagaaatcggagctgtttttcggcaaatacgtgaaagtcgccacatctctttagaggaagctacgggtggcgaattttcgcgctccatgttatctcgatttgaaagaggagaaaatgacctgacgacccaacggttttttcaggctttgcaacagatcaaaaccagcctcagtgagttttctcatctagctggaatcgatcagcactcctttattcccaaattgttgaaagagcactatgaaaacatgagcttggaacacgaccaagacttgtaccaaagctaccagcaagcctaccagaaagatcacaaaaaagaagacttcttagccagcattattctcaaggccaaaatacttggcttctatcctgaggtagagttggctgctagccaagaggaactagatttcctctatgactacctcttctctgtcatggtctggggaaattttgagttaagcctattttcactgacctctcctcttttctctagtcagctctatcgacaatacacagaggagttggtccaacgggaggatttcaagcttctcctagattcctctcgtcctgccatcaattctattttccttaatggcttttttctcgccattaattcaaatgaatttgaagatgcatctttttttgatcacctaattaacgaccacttttactctgagaacgaagcctaccttcggacggtttatctctacgccaaaggagaatttctctatcgaatgggagaaaaagaaatcggtcttgaaaagatggaacaggccatccaggttctctctattctggattgtaaggacagtgctaactactacaaacagggcctgcaagagctgatcaataaatcctaaaaactcacagatctactctgtgagtttttgttgaaaatatgcaacattaattttttctttctttttaggtttacaataggactatcaagtaaagaaagaaggttcttcccatgatgaccaaactaaaaaaccacttcctccgctttcttctctcacataccagcatttatctgaaggatcaggaacttcttctctctgaagaggagaaaatggacctcttcaaacagatctttcgatctatcaaacaagtcctagcaactaatcacgtgaaggaggaaggcttatgaaactcttagtccgtaataaaatttttgccttacttagtctttcacgctttttgaataccctcggtgctgccatctacaatctggtctttgtggtctttgctgccagcatgcctcagcctagtctggcagttggcattgccaatctcattgtatttattcctagcctctttagcatttttgttggtatgaaggctgaccgcacgaagaaaaaagctaactggttgatccgcattggctatcttcaagccatcctcttcatccttattgctctcatgaccaagattccgggttaccttgccttttcgattgtttgcttcttaaacatagtttcagattgtttgagtgattatcgcggaggcttgcaactccctatcatgaaaaagaacatccccgacgaggatttgatggaggcctattccttcaaccaactacttagtatggtctgctcgatttctggacaagctctaggagtttggttgctagccatcagccatcaaaattttgccctggtcgcttcgatcaatgcattgacttttctcctgtcttctacctgtctcctgatgagaaaaaagcagctgacacatgatcccgtcattgagccccaaagtaagaattctttggtacacgaatgccaagagatgtaccagaacgctaaaagtatttttgcagatgaggaggtccaccactttggcaagttgctcttctcattggttcttatcaatgccctagggggatccatctctggtatctacaatttgcaactgcttcactcccccttctttcagttgagttttagccaatccctcttgattttagaggtagtgactattttaagcatggtctgggctagcttgacaccccatgactatttttccaagcaatcgctccaccatatcctcctgtggatcacaggtgggctgaccatgcttggtatcacaaatatcctggtacactgggatattctttcccttctactcatcactttccttggttatcttgtagcaaaaatcaacccaaaagtttccagtcttttaatgagcaaattacccgctgaaaaattagcttctacctctagctttttgggactgatggtcagctttgccatgccacttgggacagctctcttttctagtctagctatctggagccttcccctagcttgggggatctttgccatccttggtttcactaccctcctcttaacaaccaaataaaaatccaccgtttggtggattttttttacatttttcttaggcgagccacccgctcagcaatgggtgggtgggtataaaagagtttttgcaatccggattcttttttaggatcgttgataaaaagagcactgctcgcatcatcgacatgtcgttgcattggttcgctattttctagttttaacaaagcattgatcatcccttgaggattccgcgtcaattcaacacttgaagcgtctgctaggaactcccgttgacgagagatggctaactggaccagggtcgctgctaatggtgctaaaacgatggcaagcaaggaaaggatcaaaataacaatctccaaaccaccgctaccttctcgatcatcgtcccggctacggccaccgccccaccacatcatccgaccaccaatgctagaaagcatggtgatggcactagcaagggcaactgcaatcgtagagatgcgaatatcgtaattgcgaatatggctgacttcgtgtccgatgactccctccaattcctcacggttcatcacagctagaagacctgtcgttgctgcaacagcagcattttgaggattagaccctgtcgcaaatgcattcatagaaggatcatctacaatatagacccgaggcatggggatctgggctaccatagccatatcttgtacaatatggtagagttgaggggcttgctcttccgttacctcacgcgccccattcatccgcatgacaacttcggtggattgaaaaatcatgctaaaggcatagattccaccaataatcaaagctaggatgacgccaccaagggaggagcctaaccagaggtaaccaacggctgctccgataagagctaagagtatgaaaaaagcaataaggagaatccaggttctccttttattgcttgcaatttggtcaaagagcatattagtctcctaatccgctaaagtccacctttggtactgctttttcttcttcaggcacttgaaggaattcagcttgtctgaagccgaacattccagcaattacgtttgttgggaaagtttccaacttgacattgtaattgcttgtgacactattgtacaattgacgagcataagaaattttgttttctgtgttggtcaattcttcttgcaattgcatgaagttggtgttggctttcaagtctgggtaattttcagccaccgcaaagatgccggctacttgacgggaaagagcatcgctggccgccattgcttctgcaggtgaagaagcttgcgctacttgttggcgaagttgagtcacttttgctagtgtatctccttcgtacttggcatagcctttaacggtttcgatcaagtttggaatcaagtcattccgacgtttcaattgcacatcaatttgactccatgcttcacgagtttgcatccggcttttcaccaaaccgttgtaaactcctactaccatcaatacaaggaccacaaggatcccaagaataatccaaatcattttattgaattcctttcatttctttctaccagtatatcaaatttctcttattttgtggtaaaattatcttatgaaaccagaagaattttatacccatttagccaatctcggcttcccattaactgaacgacaaaaggaacaatacgaacgctatttcgagctcctagtggaatggaatgagaaaattaatctcaccgctatcaccgaaaaaaacgaggtctatctcaagcatttctatgattcaatcgcccccatcttgcaggggttgatcgaaaacaaacccatccgtcttttggatatcggagctggtgctggctttccaagccttccaatgaaaatcctttttcctgagttggatgcgaccatcattgattccctcaataagcggatcaactttctccacctactagctgaagagttaggcttgagcggggttcatttctaccatggacgagctgaagactttgcgcaagacaaggccttccgtgctcaatttgacctcgtaactgcgcgcgccgttgctcggatgcaggtcctttctgaactgaccatcccttacctgaaagtaggagggcgcctcctcgcacttaaagctagcaatgctccagaagagttggaggaagccaaaaacgccctgaatctgctctttagcaaggttgaagacaatctacagtatgaattgccaaatggggatcctcgctatatcactgttgtagaaaagaaaaaagaaacccccaataaatacccaagaaaagcaggcatgcccaataagcggcctttgtaataagatacaaagggccaagcggataaagtcaaataagaggctgggacaaaagtcctagcctctcaattatttttggattgtcaagcaagacgcagtggttgagtgggctctactacgctaatttcatcagcttttacagccctactcaactgtgcggaggtgggacgacgaaatcgaattctaacgaattaccgatttctgtcccactctcttttttatttttgtttcaattctgttcgcagggcttcttgctgctcttttgtcagatgaacgcccttacttgcaacaatctggctagagactttgttggcaaagcttaaggcttgcgcgatgtctaagccttctagacgagcggatataaaggctcctacatggctatctccagcgcctactgtatcgacgacttctgttggaaaaccgtctgcctcataccagttgccatcataggcaaccgctccgttttcacccaaggtgacaatgactatttgtcccgttctctgatacaagtgttcgatggctggctggatctctctacaccctgaaaaagccagtgcttcagcctcattaacatggagaattggatgcagatcataaatggcttccaatcgatcctttggaatcaagagtccacgtggcccaggtgcgaaaatcacctggccttctagttgcgaaacagactggaccaatgcaagaccagttggctcctcgacttcaaggccacataagtagatgtaatcaaaccgatctgtctcaatctcttttagccactctgcttggaagctatactccactccgtggtccgataagaaggtccgctcaccatcaaactctacaaagcagtaacagcaaccattggccccttctaatgagatgctagaggaaatccctaattgtttcaattctctccgaataaaatcaccatatattccagaaccgactggcgagacaaactggtagggttgcgacaaaaaatgaaggatattaacgacattaaaggcacaacctcccacagaccattgctggtgatcaatatgggcatctccttcacgacttggcaaacgatccaagtagatcatcacatcacaaactgtagaaccaataattaacgcagctgtcatctttttctccttactttgccttctattataccagaggaaacataaaaaacaaccaaccccttgtggagtggttgcttctctttttaatcacgataaacgggttgagggccaaaggtttgggaaaccggcatgatttcaatccgattgacattgacatgcttgggctgttggatcaaccaagctacggtgttagcaatgtcttcaggttgaatggcatgggcatcacgatagagggcttctacccgtttttcgtctcctttaaagcgaacagaagagaactctgtcccttcacaaagaccgggttcaatattgctgacacgaatcttcttgccagctagatccgcccgaagattgagggagaattgcttgacaaaagccttggatgccccgtaaatattggcccctggataaggcacagttcctgctgtagagcccaaattgataatatagccatcatttcgttccaccatctggggcaagattttccttgtcagataggtcaaaccaacaatattggtctgaatcatggtcagccagtctgcgacctctgcttcataagctggggcgaggcctagagccaagccagcattattgaccaaaacatccactttctcccaagcttttggcaaactggcaagtgcatgatctacctgagaaagatccgtcacatccatttgcaggggataaaaggcttctcccaactcttcttggagggcctgtaatttttcgatgcgtctagctgatccgatcacacgatatccatctgctactaaacgacggcaaatcgcttgaccaaagccagctgaagctcctgttactaaaatcgtttctgacatgtcattacctccatggattgtaaaaaaattcagattgagcagatccatcaggttctgtctcgaattagaatctagatgaaccatccctcacttgcaaaattacttcttgtattggaaggaaaaatccttcagttcaatcattacttctttcatttagttcgccttttcccataagagcgcaaattggatggctaactccgcgattcgatccttgctatctaaatcctcatgactagataaggttcggatatcccatttttcttccgagaggtggtcagctgcatagaagaaatggcagagctcaaagtccctataagctgctaaggctgccactgccgaacattccatatccacacagatggctcctgcttcctttcgtcgcttcatcttgtcgatggtttcccggtagggtgcatctgtcgtccacacttttcctgactgataagaaaccttgtgactgtccagaaaggcttggaagagagggagggttttcttgtttacttccacttcatcactagccggaagatagtggtaactggtcccctcatcacgaagagcagctgttggaatgatgatggaagtcgcttcgatatctcgatctaaaaccccacaggtcccaaaaagaacgagtttttccatcccaaattgaatcagatcctctataatccccacacaggaagcagccccaacgggtgcattaaaggcaccaatctgttggtctccaatagtgatcccatagaccaagacttcaaaattagccatggaggttcttgcaatgacctcatgatcgtaattctcaaggaggcgagcaaaagttactcttgaaaagcaagagatgacaactttgggaaatccttcaattggttggtgtaagtcttgtggattgataatcgcctgtcgattggcatcaaattcttctaacagcatttcgtgcacctctttcattctacttctaggcccctattataccacaattagcctagtcattggtttttgatcaaaggaaggagcataaaaaagaactgcttccagacgttagatttttcggatcaaacgtcggaaggacagttcactgcgatattttttacttgttttccaattgcgctaattctagcaaccgttctttggacaattttttgatttcaatttgactagcatctagcagctggaattcatctggctctagcgctgccaatagattcttcagagcaagagagccaattggatggtaattttctggcttatccggatctccatcgatcgcaaccaatagaacccgccaatcaatgatacccgctaagcccacaatttctacatattctgcaggaacatgtggcacgcttggcaagaccgtatccgtatcttctgtcaagctatagctggctaagaaggctcctgtctcctcctgttgataaaaacggacttgactgaaatatgctgcactatattgaatcttcttgataaaggcagagtaggcttctagtggatggacatggttcaagacttcctgcactgtatcccgatccaaatagactggatgagcgaagccttgtacttcaaactcttttagatctttttccttggtcacattacccagcgtttctaggataacgacttcataatcaaaatggaaaatagaatctggagtatagctcacgccgtcgctggccacaatctccgttcctaatacttctcctaggcgactaagccatcgaagggccaactgccaatcttcttctatcgcaaaagagggcacctgaatctgataagactcttcctcatcaaaatagcgtaactgcagaggaagaccgctcttaccaaatacgatacagttcaagccttcaaaatcatttaagggacgatgaagggtagcaggatcatagttgtaggttgtcaacccttctaccaatttaagaacttcctgtgctgcgagtactttctgatagccaaataagctctttttatttttgattgaaaacacgatactcatttgttttctcctttgtgaaatcgcttacctaaagtatagcacaattttcaatcaatttccatataaaaacagcctgagctttcagactgtttgtttccattatgcaggtgctccatcaagcgtttcaccgataagggctaaacgctcacgaacctctgcttgtgacaagttgtgttcttctacatagcgattgcgagggtgaactcggcactcatgtgagcagccacggaggtacttgtcttcgttttcttctgaggtcaagatgcgacggttacagaaaggatttccacagttgacatagcgttcgcatggtgttccatcaaaccagtcttttccgacaacgcttggatcgacatggttgacatcgactgcaatccgctcgtcaaagacgtacattttcccatcccacagttcgccttgaacttctgggtctttcccgtaagtggcgattccgccatgcaattgaccgacatctttgtagccttcacgcaccatccagcctgagaatttctcacagcggactccaccagtacagtagacgacaacacgcttgtccatgaatttttccttgttatcacgaacccattgtggcaattcacggaagttacggatgtcaggacgaatagccccacggaagtgaccaagatcgtactcgtagtcatttcgagtatcaaggacaacggtatcttcgtcgagaagagcttctttaaactcttttggtgacaagtaagcacctgttgtttcaagaggattgatgtcattatcgaaattatcatcctctaaaccaaggtggacaatctctttcttataacgtacaaacatcttcttgaaagcttgctcttcttcctcatcaatcttgaaccagaggtcttccatccctggaaggctgtgaacgtagtccatgtatttttgtgttgtttcgtagtcaccagaaacagttccattgattccttcgtcagcgactaggatacgtcctttaaggccgattgatttacagaaagccaagtgatcagccgcaaattgttctgcgttttcgatgggaacatatttatagtatagtaatacacgaataggttttgccataatattctcttttctaagattaaattatcagaatttttcattcaactataccagtatactctcccaagaaaacgaatgcaatttatttgactgaaaaataaaagcctgggagaccagacttttacacgatgaaaccaagttactcttccttttccaactgatccagataggcatcatagcgttttttctcaacttttgcaagaagcattacaagggtattcactccccatacaattggaagattcagtaaaaaggtaataggaagtactagtaagaattttgaatggaagggatttgactgatagacagccaggtttaattgaaaattttgagcccagatgaacaaggagagaattgaggttactgcaacaattcccgtcacatttagatagctataactgataaatctcacacccaatcgttgacaacgaacagaataatacaatcctgagacgatgagtaaggctaccaccatgattggactgagccccaccttagatgtaaaaatggatcctacactaaaaacagttaaggcaaggaaaagaaaaccagccgtctcagctccagccttattagctaagccttcttctcgttcatctatgatttgtttgttcagcaattgtaatctcaccttttctcttcctccttattcttcatcctctaattctgcctcgatcttctcttgttttttccgattgataagagcaagtggtttttcaagcagatctgtcaggagggcaaagacgatgatttctaataaaattttgaccagatacttgggactgagcataaagctcgttgcttctcgctttccaatcacatccatagctgtcacaagcacagcaaagaatagacctgacccaaggcgactcaaccagctatctttttctaacatatctcggatatcaatccctgaactgatccttctcacaaaggcataggctcccatggcaatcagaaggaacatctcagggagataagcgactaggtctaagtccaggatactggatttcacaaaggcagatagggcaataaagcaggtcataccaaggacaagttctcctgcgatttttccatcaagtagcatggtccgttcatcttttacaattggttctttcttttgtttcatattcttcctctttctattattaaaactgttactcccagaacagttgatccagcgtcttatccaaggtcttacagatggcaaggcagagactgagggttgggttatactttcccgcctcaatcagaccgatggtctggcgcgtcactccaatggcatctgcaagatccccctgggtcatatcatgctcgacccgggccatttttaatttgagatttttcgccacaggattttcctttcttgtttttatagctttattatacactatattttctattttgcaatatatatcttacattttgtaaaaaatatttttgataaaactaagaaagcctggtttcccaggctttcttagtttcctcttctttttgttagaaatgactgtaggatatatgatagtccccatcctaatccagcacccagtatgaccgtgaggacaaaccaagtgatggtcgctagatctggtgataccatcacccgattgacatagtctatcgatttaccacgatccagtaacgacatgcggtaactggctggatagaaccacatcataagaatgggccctgtcgtcgcaaaggcaaaaataacaaaagacaaggcatttcgtaaattcgagcgaaaacgaccacttgaggcgaccatctccgcaaaacttccggcgatcaaggctggaataaaggcccctgcaccatgacgcgaaaagaggaagaaggatccgatcacgcagccaactataaagatagatccaactccttttattttttctagataatagcggtagatcgtcccgccaaacagggctgaaaaggcaggagcataaaacatatttccttgatgatcgaccagatttccaactaagacccccagtccaatcgcaagaaaatagaggaaaatgaaggctccaacttgttttatttgattcacatttattctattcattggatactgatcctaacggtggctaattttcttcgaaaggaagtccccgataaattggaccagaacgatcagaatcaggatcaataaggtcgccacaaagatgacatcattgttaaacatgtttttcccgtagttgatggccaaggttcctaatcctccagcaccaacggcacctgccatggcggtttctccaatcaaggaaatgatggtcaccgttgttacacggatcaaatcaggaagcccttcacgaaggtagacaccaacaatatcccagaaggttgccccacttgcttgtgctgcttcaatcacgcctccatccaactcggacaagactacttggacttggcgggcaaagaatggaaagacagccaaagacagcggaacaagggctgctgtaggaccaatggtatttttcaagagcaagtaggtcaagggattaataaaggccaacaagataatgaaaggaatggcgcggaacaaggaagtaatcttatccaaaatttggaaaacgattctattttcgatgacaccacctggacgggtcaagactaacaaaagtcctgtcaccaaacctaaaaatccaccaataatgaaggaaataacggtcatgtaaagagtcaagtaaatagcggttccccatccatactggccagaccaccctaatttatagacatttggtaaatatgtttgaattaactggatcatgcttttctcccatctttcacaatagtcacggaaactcctgcattttctaactcagctttggccgtttccagattttgagtctcacctgataagatgaccaccaattctccgacaggcgtgtgatcaaggatctcgatgttcccaaataaaatgttggcagatacttggtactgcttgtaaatatcattgatgatggctgtatctgtcacagaacctgcatacttaagatgcgccaacatcgaatcatcaggcaagttcttcacaatcgcttgttgattgattttcaccatggcttcatcgattcctgttgcaactgtgataaagtcttgcgtcaaagcatttttcggattcgagaagatatctaaaacagacccttcttcaatcagttcgccattttgcatgacagctacccggttggcaatatctttgacaatttgcatctcatgggtgatcaagacaatggttaaaccaagttttttgttcaattcttgcaacaaagctagaatttgtttggtcgtctttggatccagggctgaagttgactcatctgagatcaaaatctttggatcgttggcaagggcacgcgcaatcgctacccgttgcttttgaccaccagacaattgggctgggtaattttctgcacgatctgctagaccaactagatccaacaatttcgccactttttcattcttttgttctttatttaaatttgaatgtttaagagcgaaggctacattttctgcgacggtcatttgagccatcaagttgaagtgttggaagatcatcccgatatcccgacgtttctctctaagagcagccggttttaaggtcacccgatcttggtaaatcacatccccatccacagtgatggttccggcacttggcacttgtaagagattgatcacccgaaccaaggtcgatttcccggctccagaataccctacaatcccatagatatcgccttcattaatatgaatggtcacatctttgacggcttggatctgacgtttcttttgctggaaggtcacatcaatgtggtccagctgaatcattgctttactcataacttgctattaactcctttatcaattcaatatgggtgtaataatcggcgattttcacattttcgtcgcccccatgatcacggctattggcattgccaattccaaaggctgccatcggcacctgcaaagcctcaaagaccgtgtgcattggccctgttcccgctgttgttggaagaacagaaactccttctctatagaaatctttggccagccgtatgacatttaaaatcgatggggcactcatatcacttcggtaactcatttcaccgagagtatagaccaattcgacctgatcatagccatttttcttcaattgttgcttgatcttttctaagacatccttgggatctagacctggaaccaagcgcacctccatcttggcacgcgcctctgccggaagaatcgttttaacaccttgtccttggtaaccagagccaaaaccttcaatattcagggctggttcaaaatagaaacgacgcaggaattcttttcggtcttccttcaagattggaagggttagaccataggtttccgctacatcttctggtcctttgttggcatattgctcgatcaaagctagttcgcgttcattgggttcttggatctgatcataaatcccatccaccaagattcggccttctttgtcacgaagactggcgatagcatttaacaaataccaagaagcagagtctaccacaccgccatagctggaatgaatatccacttctgcactcttcaccaccatatcaaaggtgacgatccccttgctaccaccggaaatttccaactgaccctgattatttcgtgtgccttgttcccagactaggaggtctgccccacgcaagtgtttcttgtgtttggccaagtatttatccaagtcagtcgatgcagactcctctgccccttcgatgataaaggtgatattgactggcaaatcgccactttcacgaatgtattttcgaagagctgtgagacgagccgtgatatgccccttgtcatcatcaacccctcgaccgtacatggttccataatgaacagataaggtgaagggatctcccgtccaaggttgatctccatcagctggtaccgtatcatagtggttataaaaaatgatggttttggcttcaggatttggcgagaaaaatttggcaatcacaaaaggtgctgtatagctatcatccacttcgactttggctcctgcagctgtaaaaatttctcccaaatagttggctacttccttgagaccaacttgttgggcaaagatggatttttttgaaatcaaggttcgcaacacttcaaaataatgttgtgcgacctcatcattttcaaatttacggatttgttccgcttctgttgcaaaaggcatgcattcctcctaatacacgataagaggtagagaattgcttctccacctccttcatacacttgagatcaaatcttagaagactggttggtccattccttctgaagattcttcgatcactttcttcacattgtctttgtgataggctttgatgatttctttgattgcttttgctttatcagatttttcccaatctttcttagcagcgatcacgttgtaccattgttttgagttgttgtctttcttttcaacatagatagcttttttgaaatcaacgcctgcttcacgaacgaaggtattgttgatgactgcagcatctactgatggaagagcagatggtgtttgtgaagcatccaattcagaaatcttcaaatcttttgaattttctttgatgtttgacacgtttgccaattgtccatccttagtatccaatttaatcaaacctgctgattgcaagacatacaaggcacggctttcatttgttgggtcatttggtacagcgattgttccacctttaggaatttctttaattgaagtgtatttgtttttaccgttttctgtaccagagtaaagacggattggagcgatgtacgtatctgctactgcaacaagggcattgtcgtttttagagttccagttatcaaggaagttgtagtgttggaaagcattgatatccacgctaccatcttttacagccacgtttggttgtgagtagtctgtaaattgagtgaattccaatttgattcctgttttagcgtcatccaagttcttttgaacttgatcccaacgagctttttcagtatcgctcaaagtcatgacacctacttttacagttgtttcaccatctttgctagatgattttgaagaaccacatgctgcaagagcaaatgttgcaatagctgcaagagctgttaaaccaagaatttttttcaatttcattttgaagtctcctttaattatatattattctttaatatcttttgcttctggtagataaactccaccaaagtattttttagacagtttttcaagggttccattgtcatagagttccttgatacgtttgttgacaaatttttgaaggtctttatcttcttttgcaataattggatacacataaggttgttggtcgcttggaagctcgataaccttcaagttgtcatagccttgatcacgaatgatagtatctactgagatccgttcgaagatcttgtaatctgtacgaccatccgctaaattagccatgatggtttgaatggttccatctgtgtattgcaagtcagttggattatctgaatgttttttattgaaatcttctaattgtttagcagtagatgttccttgaacaacttctgttttcttgccaccaatgtcatccaacgatttaatagaagaatcttttggtacgaccaacactaatggattgcgagcatatggatttggatagaggtatttttcttcccgctcttttgagtaactaatgttgttggcaccgatttggaaacggtcactatctaagccagcaaagacggaagaccactctgttttgttaaagtttacttcatatttgtctgagcctttgaagatttcacgcaaaacttcgatttcataaccggttagcttgccgtctttttcttcgtaagagaatggtttggttgttccaacagtcccaacttcaatggttttcttcccactggctgatttaccagatgaacatgctactaaagcactggttgcaaggactgcaactaatcctaaagcagaatacttaatcactttttttagattcataggatccccttatcgtttcaggcacataaaacgccattctaaaagtatttttttattttatcaaaaaagcatttacttgcctaatatatattttttatggaggtgatagtttttctttatcacacttctttggccttaaaataccgcaataaagcttgcgcattttcaacataatagggaaccgatacctcaaaggctgcatcatcgatggtcatgtgatcatgatgaaggtctggagcatccggctctccatttgaaccgataaaggcaaagactccaggaattcgctcttggtaaaaggcgaagtcttctccagcagtagaaagatttgctgggatcacttcagccaaaccttgtgaagcttcccaaaccactttcgtcaattcctcatcattaaaggtaactggcggggtcacaccccactcaaaagctacatctacttccagactttctgcaatgtgtcgaatgatggaaataaaatgtgccttcaagtctctttgcacacttggattaaaggaacgaatggtcccttcaaaatagcctgattttgggagcacattccaagttgagcccacatccaggtgcgtaatggacaaaacagctgtttcaaagggagaaacggtccgtgaaattaataattgtacattctgaaccatggttgtgacggccgttacagtgtcaactcccaaatccggtcttgcagcatgactactaacccctgtcacagtaaccttgaatttctcaacccctgccatcatagctccagcattcaaggcaagttgccctgcttttagctgaggaatgttgtgaaaaccaataattccttgaacatcctccaacagtcctgttgccaaaacgtcagaagcaccttctgagatttcttctgctggttgaaagatcaagcgaacggtcccttcaagctggtcttctttttccttgagaagagctgctgctcccagaagactggtttgatgaaaatcatggccacaggcatgcatgactcctggattctgactttggtagggcagattcgtttgttccaaaatcggaagggcatcgatatctgctcgaagtgccaccaccggttggccggacccaatttctgcaatcagaccagttttcaatccactctctaaaatacgaatccccaactcttctaaacgctcctttagaaaggcggttgtctggtattcttgaccagacaattccgggtgttggtggatatagtggcgaatctctgctaactcttcataagaaaaagacacaagccttcatctcctttcaaacttaaaattattttatcactaataggtgtttccgtctaattcctgtttcttggtttttgatatagtttcaaactatagataaaaacactcctagattcatgtcctaggagtgccaacttcagcattaagaaagatttccctcgaatttttccataaagctatcactattataggctttttctacttcccatttgccatctttcttaacaaaggtcaactggtagtcgtatcgatccggcgtcgtcaagggacgatctgcaagagaagccatcatttcctctctataggctttgttttgagcctggtttgcttcgatgatccctgggtagtcttttcgatgttcctgatagaaggtctgcatgtggtttaagatcgtcttttccatgctgacggtctcaggatttagactaatgaccaccttgtctgggagatattgtttgaccttataggttaatttcgcacgcttagcattttccttttcataagcatcgataaactggttcacttcttcttcagagaattggtaatcatgtaattgacgagtaaaatcagccgcaaatttcgcacggaaatcactggcttcctttttcaaatcagttcccaaaacaaaagcgtcatcctttttgacctttcgttggccactgaagtaaacttgattgatgtattcatctgcaagaagggtagaagcttccaccttgtcctcataccgagaagaatccaccgcaaattttagaggtttggattttttatcagagctataggtttttcgttcatactgcacttcgtattttttgcctttttcgactgggaaaacgatatagccggttaattttttatccttagccaactgatcactcttgagcaattggaaggcttccgtttggtcataaattcctgactgcaatttgaccttgttattatccgcatcgtaaatagtgatatctgaatctgacacgttgatagattctttggcaacatttttaaattctaattgaagggctaaataggttccgtcttctgagtcattgaggacaggtggtttgatgtattgccctccttttaaactcacctcgacttgaccgtcagatgcggagcttttcgctgctttttctgtctttgcttgctgcgaatttgtcttttgagcagtagttccacaagctactagactcaaggtcgccacagcaaataaggtccatttaaaaatctttttcattctcatctccttaaaaaagttttgttctattttaacatctttttctagctatgtatacgctatatagtgataactcttccctcaaagggcgaggattacaaaaaggccaagactttcgtctcaaccttttaactgaaaaataattgatcttggtttcacaagattcctttttctttttgaatcatgagatccttaagggaaatcaagaggaccgcaaggaggatcatagccatcccgataaaatcaatggcaaagaaatgttcattcataatggcaaaggcaaaaaatacagctgaaataggctcaatagctgcaagaaggctacctttgaccggtccaatcagagttgtccctttcaaaaagaccgtataggcaaatatggtcccaatcaccactaagccaactaagcccattagattatccatgctatattggccatgaaaaagtcttcttcctgtgaagggaatcatcacaagtcctggaatgagcataccgataccaatcaccaacatactaccccatttttgaattaactgaataggcagaatgatgtagagggcataggcaaaggcagaaacaagtccccaagctagccctttaggagtgattgccaattgattgagttgaccatgggttgcaatgagaaaggtccctgcgatggctaagatcatcgaaaagatttccgataccgtaggagctacccggtccttaacacaagaataggccaaaactccaatgggacagagatattgcaaaacagttgcagtacctgcattagtcgcatcaatcgcttctaaataagtcaattgagtcattaacaatcccaaaaatgcaaataaaagcaaggggatgtatgacgagcggtctgttagaaaggcctttactttttcctggtccgctagatatgcaagaagcagtagtacagctcctgaaaacactaaacgaattgttgtcaaaccaattgctgtaaatccatgagccagcaggtactggccacaggcccctgacaagccccaagcgatcccagcaatcaaggtcatgagtgttcctttcatcgtctttgacatagtcccctcccaaatctgttccttacttttattgtatcataaaaggccgaaacgaaacgtttcagcctcatatatttcatataaatttattcgcttattcaggttgaaccaaaatcttgatttgagatttatcttgtgttaattcaataaatccttcttcaacgatattttccaatttaattttcttagtaaccaatttttcagcagagaagtagccttgttccatcaattccaacactttagggaagatatgacggtaggcaataattcctttgagagatttttcttggatagcaaattcatttggattgatgctagcttcacgttcccagatagatacgaccatacattccccagctttatgaacagctgccaaggcttgacctaaaacaactggaaccccagtaacttcataagaaacatctgctccaccacctgttaaacgatggatggcttcgacgattgtttctccttcttctgggcgaacaacgattgctcccaattcttctgctttcgcttggcgttcaggagacaattcaaccgcatagatttttgatgctcctgctgcacgaagggcttcaacgatcaaaagaccaattggacccaagccaaagataacagctgtatctccagttttcaatgcagattgacgaactgcataaacagcaaccgcagcaggttctgtaagagctgcttgttcatagctcaagctatctggaatcacatgaaccaaatccccatcaaggacacaatatttggcaaaaccaccatctgcagcgaggccgacaaagttcaagtttggatcaaggttataatcaccaatcaaattgtgctctgcaagaattggttcgatagtgacacgatcgccaactttgacacgagtcacatcacttccgacttctacaatttcaccagagaattcatgtcccaaagtgaccggtgctttttgaccagaatacacatgttcttcagttgggatgaagatcggtccatccaaatattcatgcaagtccgtaccacagatccctgtgaacttaactgccacttttacttgatgtggttgtacttcaggtacttccacttcttcgatacgaacgtcttttgctgcatgccagcgagctgctttcatagtagccatatgatgatctccttgttttcaccttttttgttttcttttcaggaaactttatatttaaaattgtaaacgttttccttttgtttgtcaaggaaaaactgaagatgaaaaagagcagccctttgattgctccttcttatttcttcttgatccgagaagattccaatctccacccaacaatccaaccaaggactaggagataattttcaagcgcaccgatcccattgaccggcagatgatagtgaaaataactgaagagatgattagtaccgatcccaagcccacctaggatcaaagccaatagaaccgttcgaagataaaaccaatcgtatttgagattgacagcaatcaggatcacaaggaccgccacattccaaatcccaatctcccgttgccaaccgacagaaataccatatcccgaatgacttcccatataggatggaaagaatagctggaagataatcgctccagtcatggcgatgataaccaggataaataagactcttaaaaatttgttcatgtaactcctcctaatgccagttgatatgtaatggtctttcctattctaacacaattttatggttagtaaaaaccaacctctcggctggttttttctctattactcttctttcaacttcgccaattcttgagcaagtaacttgagggctacttgtgggttggcttgacctttggttgctttcatgaggaagcctgtaaaggccttgtccgcattccgtttccctgacttgaagtcagctacggctgcttcattgtctgcaaagacttggtggatgattggtatcaagacttcaggatctgaaatctgtaccagaccagctttttcgacgtattcacgcgcgccgccaccgtttttcgccaagtgaacgaagactttcttggcaatcttagatgaaatggttccatcttcgataatggcaatcatttcaaccaagttttctggtgtcaattggatttcttccagcgttttgccttctgcgttcaagaattgtgcgacttccccttggagccagttagacacttgtttggcatcgccaccaagggctacagctgcttcaaagaagtcagaagtaactttcgtcgctgtcaattggttggcatcatagtcagacaagccaagctctgccacgtagcgagcacgacggtcttttggaaactctggcaactcagtacgcatttcctcgatccactcatctgagatttcaaagagtggtaggtctggttctgggaagtaacggtaatccgcagctccttctttgacacgcataagaatcgtgctcttattggcttcatcataacggcgtgtttcttgacgaatgacaccacctgaacgcaagattttcgcttgacgctcaacttcgtattcaagacctttacggacgtttgagaaagagttcaagtttttcaactcagtcttggtaccaaattcctcttgaccatatgggcgaagggaaatgttggcatccacccgcatagatccttcttccatcttgacgtctgaaatacctgtgtactggatgacttctttcaaagctgtcaaataagcgtaggcttcttctggagaacgcatatcggcttcagaaacgatttcaatcaatggaaccccttggcggttgaggtctacgtaagagaatccatctgttccgtgggtgttcttaccggcatcttcttccaagtgggcccgttcaatcccgattttcttagttgagccgtcttccaattgcacttcaatccaaccgttatatccgattggctcgtcaaattgcgaaatttggtaggcctttggattatcagggtagaagtagttcttacggtcaaagtgcatgtgctgatggatatccatattcagcgccaaagcagccttgataccagcatccacaacacccttgttcaagacaggaagcacccctgggaaagaccagtcaatcacattggtattggcattttgctcgttcccaaagtgagcagaggttggtgagaaaatttttgagtttgtattcaattcaacgtggacttcaagtccgatgactgtttcaaagttcattaattgtcacctccgaaaataaggggttgttgcttgtggtaatccgtcgttgcttcaaaggcagctgcagcttggtagatggtttcttcagaatacttcggaccaatcaactgcaaaccaactggaagaccttgcgcaaaacctgcaggaatcgaaatccctggaagacctgccaagttgactggaatggtcaagaggtcagccaagtacatggcaaccggatcatggttgagcgaatccaaatcaaaggctacacttggagctgttggaccaaggataaggtcgtaatctgcaaagactttttcgaagtcttggataatgagggtacggacttgaccagctttcttgtagtaagcatcatagtaaccagatgacaaactaaaggtaccaagcatgatacggcgtttgacctcatcgccaaagccttgactacgagtgttcacgtagatatcatccaagttcttggcatcttccgcacggaaaccatagcgaataccgtcgaaacgttgcaagtttgaagaagcttcagatgaagcgatgatgtaataaacggcaaccccgtatttagagtgtggaaggctaacttcttcgacagttgctcccaatttttcaaagtgtttggccgcattaaggatagtttctttgacttctgggtcgatcccttccccaaggtattccttcggaagggcaatcttcatgcctttaatgtcttgaccaatcttagaagtaaagtctgctacacgaacaggtgcagatgttgaatccttggcatcttcactagcaataacattaagcaagagggcattttccttaaccgttggagcgaaaggtccaatttggtcaagtgaactaccaaaggcaatgagaccaaaacgggaaactgttccataagttggtttgagaccaacaatcccgttaaaagcagccggctggcggatagaaccacctgtatctgaaccaagggacaaacggacttggcctgaagcgacagaagctgctgaaccactagaagatccaccaggcaccttgctgtggtcccatgcattcttggttggtccatagtaagaagtttcaccagatccacccatggcaaactcgtccatgttggtcttcccgatgacaatcatatcttttgctttggcattggcaacagctgtcgcatcaaagattggctcgtagttatagagcatttttgatgccgcagtggtcaagatgccatctgttgagatattgtctttgactgcaagtggaatccctgacaggaggttatctgcatcgattcctttttcatcaatagccttggcttgtgcaagggcagcttcttctgccaccgttacaaaggcattgacggcttcttcacgcgccttgatatcgtcaagcgtcgcttgtatcaattccgttgccgaaatttccttagagacaaggaggtcgtgcaactcttcaatggttttattgttgaatgacattaggcatctcctccatcttctaggatagctggtaccttgatgtaatagttatctttttcaggtacatttttaaacaagcggtcacggtcagtccctttttcagcaacatccggacgcaatacggtcttgcggtcagccatggtcgttgttggggcaacacctgtcgtgtccacttcttccaacaattccaccatgtcgacaattttcgataaggttgtcgcaaactcagctgtctcttctggagagaatttcaattttgaaagattggcaacgtgggttacctcttcttgcgtaattttcatcttgcttcctttcgtgaaatgatgatttttcaataccctctattttaccataatttagcccaatttgcttgccttagaaaaaatctgtaggacttttttgtcgccacagattcttctttttatatttcttttccgccgaattgccccatctccattagagtctctctccagacttcctggacgttagaagcgaggtaggaagaggccaagtcataagaagcctgatgaaatggagcgaggtccctttcaaagagctggaccagcttgtccgccaactctttcaccaactcttcttctggcactgtctcgctataaggtaccaaaaagccattttcaccctcttttataaaagtcggattgccataacgagcatcaaagcccagcaaggccaaacctgctccagccgcctccatcaaggtcaaaccaaaggtctcccactgagaagtggtgaggtaggcttggtagcaaggatagatctgctgaagatccgcatgcccgcgtaggtgaatataatcttgcgctgcaagctcctgaatcaggtggcacaagttgtctgcttctccaccctttccataaatatcaaactgaagggctggaagttgttcatgagcttgggccactactcgaatggccaaatcgatgcgttttcttggatccaaacgggaagctgtgagcacactaaagtgaggccgatctcctagtgattccgtcaattcttctagatgccctactggaatgctatagattggaattccttggcatcctttttcagcaagcgtctgctccaagacttctttttgaggatccgtcgccgtgatgaagtaatcgaagcgtttggcatacttgaacacataataatattcataattgagatggccattttcaaattcatgctccgaatgaaacaccatggcgagctttgaaggagcaacgttctccaacaaaggacgggcaaaatccatgcgcgaagcccggtcaagcagaatcagatcttcttcttttagcgacagcggcgacaaaaaacgtctcatcacttctgtatggttggtcaaaatctcagaccccagtttatagagccagcgtccaccaaacctcaattcttcaaaagcaatactcccatcttggttgtggtaggtccgtctgacaacactaccatactgaaaatactcggtgacaagtttacaagctccataatactctcgcttgattctatttccagccaaaagatagtctacatagcggacacagtttggatgatagggatccaaatgaaaggtcagggcgtttccatccgcaaattggtagcgaatggctctttccgttttttcaacaacatccagacgcgtcagttgaaactccatttgcaaggcccctaccgtcttttgagggaccgtagtctgttgatccgtaaaagctaaatgggcaaaaagcagttcctcatcccggtgccccaatgagaggtaataggccaatttttctggagtgggccaagtggtaaagataaacttcgctgctactcctaggccccggagcatctttgcccgagaggcttgtgcaacatcgaccccattgggttcaaatcccactaatagattaaaggtataaatggtcatgctgtccctccctctaatcgcttaaacagctcttccaaagcttctttttcaggcaatttcaagattcgtgcctgctctcttaccaattctttgtgggtctctggatgctggagcaaggtatctagttgctgtttcatttcttcgactgtatctgtgattgtgctcaagtttttataggcttcctgatgaaccgtgctcttcaaaccaaataagacttgcccattttcaagagcatgaagactactactccacacttcttctccctggttgcaatccagataaatagagcagctggataacaagtcctcatatttgtccggcgaaatccctggatagaggcgcacattgggacgagttgctaagtctgttaattttggccccatagccgtcaaagcagcaatgtgaaaggtcacttgtgggaattgatggaccaggctagataggccttcgacctcttgagaagccgtcatgaccatggcttctggttgaaaactttcctgctccacatctaccagccctgacaagactgtgattccggcttttttctccctcaacagaccatcttctaccaataaaatctgactgacttgttctttgatctcgtctagatcatgcgcattactggcacagtaggcgagtctttcctttggtatctctttcacaacatctagtaatgacttgtccatcaaaagaacagcttcatcttccggcaagacttgttctaagacagctctttgcagctctttcttattggcatacaggcgatcccgtcccttaggagtttgaagcaaaaaggttccttgtgagacaaagtgaagcaagacttcttcttgttgacggttcaaatagatgtctaaatatggttggccagattccgtaaggagactctgtttgcttctccagccatagcggttgtagacatcaatggatacgatctcttctccctgaccaaaccattccactctgtcaactgttcgagacaagatatcctctctcaaaaccacgttggcacgacgttcctcaccatcaaaaagataggttgtgatccctagtgtccaacattcccataattctggaactgctagatcattgaaaaataaaggttttccaatttttgatgctgcgtctttttgggtaaaaaaggtcgcaagactctctgtctgttggtccaaatctgtttccagattggtcacaaatactcggtagggctggctaagtttgttcaagtatttttgcaaacgatccagctctctggtctgctctgatgcaataatgaacatgctgatcctttctcatcaataaggggttagtccatcgtttcaataaaacggaggttggtcaccacgcgctcataggtttctgtcccttgcaagcctgcttcctctaatttttcaagggcccgtttcaagcgcgttttgtagatatagcgatgccaagtcaaatcatagcccaacatccccagtagagccaacttctcctgcttagcttccatctcatcgacgactcgcttttctgtccaaatctgggacagagtatctgcacggcccacacgataccaataaatacatttctccgtatgaactacccgatgggcttttaagaatagcttgtacatcaggaagttgtcttcgacattttttccgactggaaaacgaagcccttcaaataagctacgcttatagagcttcatcatggcacaagcccaggccatatctctggtctcctggagggcatcgtggtccatgatctctctcccctcataaagagtctctgaataatcatcatccgttaccttgatcaagtatttgctactactgtcatcatagaggttatagttggctacggaaacatccgcatcatacttttgaagttgacgatagagcacttccacatagtcctccgtcacccagtcatctggatcaataaaggtgaggtaatccccagtcgctagctcaatccctgtattccgagcagcagataagcccccattttcttggcgaacgtagcggatgcgcgcatccttcctaaaaaaatctttacagatctcttctgactggtctggcgaaccatcattgaccaggataatttccaaatgagggtaagtctgatggataaccgtttctaaacattgtctcaaataagcttctacattatagatgggaatgatgatactcactacttcatttgtttccatgcttcttctcatttctctttaaataatcgcgaatcgctgccaccatctcctgcacctgatcatccgcaaacacttgattctctccattctccacatgattggttccttcaaaagagaaaatcggtaagcccaattgatggatcctttgcgtcatctgatccacctcatcatagggattgatatccagatagaaatccaatttttctaggacctttcgactggtcaagggatcaaaagagggataaagaaagaggttggggtagcgttccaattgcaccaaattaaaaccaaaatggctatgggcaaggacatgaatcgctacgtctggcaactcttttaacaacgtctccaactcgtggatatctgctgtatgggtataaatggcagcatgataaggaaattctcccactaactcttgataggtttgcttcaaaatcggttttcgaagcaaaatttcctcccaagagagggcatagtaaaaccaccattgttcccgaaaacgattgaagcgtttggaggtccatggtttattatgagaagtgtaatgaatgaccgccggaatcccttgaaaggcttcataccaatccaagtccccatagaggtgctgatccttatcagatcctacttgtaaattataggtccaaggtaatggaaaccacgcatctttgaaatacagattcaaaattccttgatctccataaacatgctgatggtgttcacgagtgaggtcaaaaagcgcctctgtcacttggtgctcttgccaccaagtcttatcaatcaccaaaagtccagcattaaaaccatctgtcgtcgttggcttatcgaccactgcacccagtccataaccttttagatcaacctcaaataaaggcgataaatcctgtgtaaagatcatgtcacaatccagatagaggatccgttcttcctccacaaactctggaatagcgtaacggaaataggtcgcatagtgaatatggtcgcttggaagcgagaaggattggaattgctcaggagacatccgacaattgatcacttctgaatccaactggcgcaagcgctgattcatgatagtaaaccactctgttggtagatcttcattcaagacataaatttttaactggtcctgataggcacacagtgacttcatagcggtttccaacttttccatataagatagatccgctgaaaacacgacagcttttttactcataactcccccttattttcttccattagaataccattttcaagagaggaagacaatttctaggcccgaaaaagaggcccagacaaatgtctatgacctcttttacaatcttttcttatttagtatctaatacagctagtgcgctgtctaccaagcttgcccctaagacatgcttgaaatgattcaaggcaaactggtgattttcaggagtgagtgatgccactgcaggttccacgacttcgatctggtagccgagattgtaggcatcaaccgctgtatggaggacacagatatcagtcaagaccccagtcaaaataacggtatctacatggcgttcccgcaggcggatatctagatccgttcctgaaaaagcagaataatgacgtttgtccatccaaaagacgcgtggatccgctttgtgctcccgataaaaatctgctaaagggccgtacaaatcacgtccgctagtcccaatgatattatgaggtgggaagagcttgctttcaggatgaaatggatcctctacatcatgcgcatcaatggcaaaaaagacataggctccttggtcaaaggccaattgggtcacctgagcaatagtctcagaaatggcttgtgcaggagcacctgccgtaagtttaccatcatctgctacgaaatcgacagtgtagtcaattgaaatcaaagcttttgtcattagtaatctcttttcttaatttcctcaaagatatctggaatcaacactttgagataggttcccttcattccaagagaacggctttcaataataccagctgactccaatttccggagtgcattgacaatcacagagcgggtgataccaatccgatctgcaatgatagaagcagtcaactgtccctcatttcctttcaattcactaaggatggcagaaacagcacgcaattcagagtaagacaaggtattgacagccatattcaccgctgtccgacgacgaatattcttctcgtcttcctcgcgttggtagttcaacatttgaatccctaccacggtactcgcaatctcaaccaagatcaaatcatcatccgcaaactgtttatcattgcgccaaatgatcaaggaacccaatcgaatcccagaaacatgaataggcgcaatggtcgtcaagccatcaggaaattcagacttggtttcgaccggaaagatactcaaatcatggtccacatctaaattagcttctgtatcgtagaccaaactagctgccttggcataatcttctggtaattttttattttgaaagaaagcttctacccggtcattgttggtcttgtaacgcatgaaataaccaagaagggttcccttgctattaatgatacaggcattacagtggataatatccgctaattgttgggcaatatcattgtaaggcatctcgaactgcaactgttcatcagtccgtttcaagatggatgtaattttacgtgtcttttctaataagtttgccataataaacctcacatatagtcagctcaagtatatcatataagtgtgggaatttcaatcaaattatctgaaaattatttattttttctacaattatgcgcaattcagaaaaatgtcgattcgatgacatggattttataaaatgaatcaaaaaagactgaagaccttcatcttcaatctttcatctgattagcgtttgtattgtttcaagaaacgagtcattttttcttgaatttgagctaactcatcgacacgtggaaggtaaacgatccggaagtgatctggatctttccagttaaagccgcggccatgaaccaagagaatcttttcttgcttcaagaattctaaaacaaattgttcatcatcatccacgcggtacatgtcccgatcaatcttagggaagatatatagaccagcctttggcttaacagctgagaggcctggaatatcattgatggccttgtagataaaattgcgttgttcgtagatgcgaccacctggaagtaaaagttcatccacggattggtagcctccaagagaggtttgcacaacatgttgagacaagacatttgaacaaagacgcatattggacaacatgttcaagccttcgatatagcccttcacgtgatgctttggtccggacagaaccatccaaccaacacggaaaccggcaatccggtgagattttgacaagccattcatactcacacagaagagatcaggcgctaaacttgcgatagccgtgtgtttttcaccatccatgaccaagcgatcgtaaatttcatccgcaaagatgatcaagttattttgacgagcgatctctacaatctcaagcaggatctcatctggatagagggcacctgttgggttattcgggttgatgacaacgatagccttagtgtttgaggtgattttcgacttgatatcttcaatatctggataccagtttgcttcttcatcacaaagatagtgaaccgcattcccaccagctaggctgacggctgctgtccaaagaggatagtccggcatgggaaccaagacctcatccccgttgtcgagcagtccttgcatggacatgacgatcagctcactcactccatttccaaggtaaatatcatcaatatccacatttggaatttttttcaactggcagtactgcatgatggctttgcgggctgaaaagatcccttttgagtctgaatagccttcactatcacgcgcattcatgatcaaatcatggataacttcatctggagctgtaaagccaaattcagcaggattccctgtattcaaacgtagaattttttctccatttgctcgcatgcgcatcgcttcttccaagactggaccacgaatatcgtaagcgacatgttcgagtttgcttgatttattatattccttcatattctgcctcgattcacgaaattatctctattataccactagttcaaatagagtacaaaccgaggactttaaaaattctgcaaaaatatagcagaaaagcgagactttacctttacattctagctcaaaagagataaaatataagtgtataaagaataggattcccttctattctatccatgttttcaagctatatggaggtaggattatgtctcaaaaatacgaaaacattatggtcgctgtcgacggttctcatgaagcagaattagcctttgaaaaaggggttaacgtttctcttcgcaacggctctaaattgactattgcccacgtcatcgatactcgtgcccttcagagtgtctcaacttttgatgctgaggtctacgaagaattgcaagaagaagctaacgaattgctcaagggctacaaggaacgtgctgaaaaagtcggcgttcaaaatgttgtgactgttgtagaaatgggaaatccaaaagtcctcttagccaatgatatcccaagtaaggaaggggttgaccttattatggtcggggctaccggactcaatgccttcgaacggttaatggtcggatcctcctcagaatatatccttcgccacgccaaagtagacttactagtggtacgtgataaggataaaaccatgtaagaaagaaaaagaggctgggacaaaagtcctagcctctcaattgtctttggattgtcgagcaagacgcagtggttgagtgggctctactacgctgatttcatcagcttttacagtcctactcaactgtgcggaggtgggacgacgaaatcgaattctaacgaattaccgatttctgtcccactctcttttttagttgtctttttttgcttctttttgttttgcatgtttttcgtaggccttgagctggcgatcgagttcttttttgatagctggttccggggcgtatttttcttcccaatcatctggcttcagaattttgtgggttactggatcaaagtgcgcctttccatctgggaaaatcttgcccatattggcccggtgaacaatctcaaagacctcttcaggatcaactcccattagtacaaagctaccataagtcagatagagggtatcaattaaggcatcaacctgccctaccatggagatctcagctggatgcttgctccgaaccttatctgcagccttatccaaggcttcgtgaagagctgctaccgagcggtcaaattcttcctcacttgtgctagctgctcggacaaattcaaccaactcctcttgcttgaacatggtccgataaagggcgtcttgaggctgccaaacaactggtttctcctgggtttccccatccatcacaccatggaaggttttgaccttattgaagtgatcatccttagaaagaaagagttctttctctgagagaataccaaagtgttgcagggccttttgaatgccatccttgccattactggtcgtggtatgcttggcaattgccttgacactggtcgtcccatttcccatcgcaatagacaagccaacacctgacagcatctctaagtcattatcagaatctccaaaagccatcacttcatcgatgtcaaagccaaattcctgaccaacgatgcggatcccttctaacttggaaatgcctgggttgaggacatctgctgcaaatggactagaccgtgtgaatttcagatccggaaactctttttcaatttttgcagtctcttctggactcgataagatcaacacttggtagatcggttcttgcgctagtgcatagagggtgtcctgatcttgtgggacgaccttgctgaccactttgttaaatcctcgactgactgtacgggccattttacggggcacaaagcgactggaccaggttgaaataggactcatcccaaaactcatgatccgagaaccaaataccccatccttggtaccgagagcaatttccttacggtgttctcgagcatagtcaattagttggtgcagactctttttatcgattgggctagtaaacagcacgcggtccttggtcaaaatatactgaccattataggtcactgcaaaatcaaaaccatagcgttccataaacggtttgacaaaggccggtccccgacctgtcgcaagacctacatagatcccttcttcctttaaagactgaatggctttttctgttgattttaggaccgctcgactatcattgaccaaggttccatcgatatcaaaaaagactgcttttatttccatgtctactgtttctttctttttatgataaaataaattatatcacatattccaaggagcttcacatgtttaagaaaattttagcactacataccggagggaccatttcgatggcggcagatgactctggggcagtaattactaatgaaatcaatcccatgacccaagttacttcaccaattgaagggattgcagtcacctcagaggacttcttcaaccttcccagccctcaaatgaccccccgtcacatgttagctctatatcaaaaaatcaaagaggaagcccacaactacgacggcatcgtcatcactcatgggacagatacgctggaagaaacggcttatttcttggataccatggagttaccagagattgctgtggtcattacaggagctatgcgaagctccaatgagctcggaagcgatggtgtctataattttctgacagcccttcgagtagctgccgatccaaaagcacgcgataaaggggtcttagtcgtcatgaacgatgaaattcatgcggctaagtacgtcaccaaaactcataccaccaatgtcagtacctttcagacaccaacccacggtccactaggtttggtcatgaaaaaggaaatcctcttctttaaaacagccgagccaagggtgcgctttgatctcgataccatcgatggtttcgttccgatcattgctacctacgcagggatgaaatccgatctgctggacatgctggatctttcaaagctggatggtctcattatcgaagcctttggagctggaaacatccctaaagaaacggcacataaactccaagagtttatagatgcaggccttccaatcgctttagtatcccgttgcttcaatggaatcgctgaacccgtctacgcatatgaaggaggaggcgtccaactccatcaagcaggtgtctttttcatcaaagaattaaatgcacccaaagcgcgcatcaaactcctcatcgccctcaatgccggcctaaaaggacaagaactcaaagactatatcgaagggtaaaataagatacaaagcccgtaaaatgccaagtgaaaataggaaattgtcgctgggagcgaagctcacaagagaatttatctttttcacacagcatttagggcgtgttcaattcgtgtaacgacaagcactatgtgccttgccgacacgactcactaactcctcaggtggatggtatcgatccaccttcgtcctgtcgcaattcaacaagatacaaagggcgtaaaatcccatcttaaaagtgagtagagtggaaacaacacatttccactctactcactttttatgatctaatctaaatgttcttgcttctccagataaagagagagcaaatgccagtctgggtgttctcgccaacctggagtggctacgatctggctagcaactttccttgcttcttccagaatgggataatcttctaccaaatccgccacttgaaattctgggatcccagattgacgggttccaaagatttcacctgaaccccgcattttcaaatcttcttccgctagaacaaacccattggtcgtctctgtcatgattttcatgcgctgcttgccactatctgtcttaggattggctactagaatagcataggattgcttgcttccccgaccaacccggcctcgaagctggtgaagttggctaagaccaaaccgatctgcatccataatgaccataacggtcgcattgggcacgttgactcctacttcaataacggtcgtagacaccaaaacatcgacttggtgctctttaaaggactgcatgatagcatctttttcttcacttttcatcttcccatgaagaagagaaacgcgtgctcgctgtccaaagaaggtctctagctcttctttgagggcaagggcgtttttcaaatctagcgcctctgactcctcaatcaatggagaaataaagtaggcttgagaacctttgccaagttctttgactaaccagtcgaggaccacttctaactgctcatgcttgacccaacgtgtgatgatttccttgcgtcccgcaggcatctgatcaatgatggacacatccatatctccaaaggctgtaatagccaaggtccggggaataggggtagccgtcatcatcaggacgtctggattttgtcccttttctcgaagaatacgacgttgggaaaccccaaagcgatgctgttcatcaataatgaccaagcctagatcttggtagtgaactccctcttgaatcaaggcatgtgtccccacaatcaattgggcttttcctgaggcgatctcttctaagacttctcgtttctcagccgcctttaatcctcctgttagaagggcaattggcaaatctggaaaaagattttgcaagctttccttgtgttgctctgccaaaatctccgttggaaccatcaaggcagcttgcttcccagcgcttaaggctgcatacatagcaagaccggccacgactgtcttcccgcttcccacatccccttgtaagaggcggttcatatgataaggagaggccatatctgtcaagatttcattcaggctgttttcttgagcttgcgttagctcaaaaggaagctgtttttttcgttctgctaatttttctggattccaggccaaggaaatcccttggctggcatcgtgattttcttcttttagcacttggagttgcagctggaaaaagaggagctcttcaaattttacccggcgaagggcttgcttgtactctgccagatccttaggaaaatgcatagcttgcactgcttgggaacgagacataagttgataacgatcccgcaagacttggggtacattctcttctaaaagctggtccaaaccctggtcaaacgctattttgatcaatttcaccaggctgttttggctgactccttgcgtcactcgatagaccggttgcaaatcatcttccacttgagccaggagtttcatccctgtcaaactgcctttggccttgtcccatttcccaaaaatcgccactgtctgctgaacctcgattttgtctgctaaatagggttgattgaaaaaattaaccgcaatgacctggtctccctgtttgatcgaaaaacgcaagcgatttcgtttgtagccataatattggacattggctggtgttgctaccactccagagatgacggctttttccccatcttccaactctaaaacattgcgcgttttgaagtcttcataacgaaaggggaaatacaagagtaaatcttctaaggtttcaatccctaactttttaaatttttccgccgattttggaccgactccaggcagtacagataagggttggtgtagattcatttctcctcctttcttttataaaaaagcaggtccatccgggaaaatcccacctgcttcttcttattcttcacctgtatagtcacgaggaatccgatcactcaagagacagaccacttcataattaatggtaccacggtaatctgcaacctctgttgccgtgatttctttctcgccctcacgtccaatcagggtaaccttggtccccagaggcaattcttcaggaaggcgaaccgttatctggtccatcgaaacgcgaccaacaatgggacaaaactcacccttgatcagcacatggaaattttgcatctctcggatccaaccatccgcatagccgataggaatcgtcccaatccattgggattcttctgtcgtataagttgctccgtagccaatatcttgaccagcttctaactgtttcacatgaactaactcactcaccaaactcaaggctggcttgatttcataaggcaaggctaacacagaaccactgggattcaagccatacatgacatctcccaagcgcacagccgtgaaaatcgtatccgcatgccacaaagaggtggcagaattactagcatggacaatgggaggaagggtttcaagagcagccaatacttctttgaaaaactggtattgcgcttggaattttcgatcatctgcttcatctgctgtcgcaaaatgagtaaagattccttcaatttcagctccagctgctaagagaagtcgttcagccactttgatgtcttcgatccttcggaatccgatccgccccattcctgaatccaccttgatatggaccttcaatcctgaaagatctgcttcttgtccaagcaattggtccaaccaagcaagactagccaccgttaaacggatgccatgctctttggccagattcactgtttcacttggcacaactcccaaaatcaaaatagggtgttgcaagccttcttcacggatttcgagggcttcatccatattggatacacaaaagccatcaacctgaggtgccaattttttggttactgcagcgaccccatgaccataggcgttggccttgacgactgcatatttcaaggcttgactcggaatatgctcactgacttgttgcacattaaaggcaatggcatccaaatcgactcttgcaacagttggtctatgtttacttgctttcattttcttcctccaaaatgacactggtcgacactaggtctcccttatgactgatcgaaatccataccttcccagaaaaaggagacttggaaaaatagggtgctccgtgggcatcatttaaaatttctaaatcttgaaaaccaaccggtccaatccctgttcccattgcctttgaaaaggcttctttggcggaccatcggcccgttaaatattccattttccgttttccagacaattcctcaaagcgctctcgctcagcctcggttaagactttttcagcgaatcgagtattcttctgataggctttttcaatcgcagcgatcgattcgatatcgatgccatgtcctttgatcatcttgttttatccttatttatcgtttcagtatcgttttactgacaaaagagaagaggctaaagaatcactccttccgcccctgccttttacttattcatcgttgcaatttctttgaccaaggcctgtgttttttcccaacccaggcaagggtctgtgatggattgaccataaaccactggttcattttgacggccatcttctagataggattcaatcatgaaaccacgaactaaagttgccaaatccttgttccaagcacggttcatcatggtttctctcacgatgcgtacttgctcttcgaattgtttgccagaattgtcatggttggtatccaccaggatgaagggatgttgcaagcccatttcgctatagcgttttgctgccgctagcaaatcttcataatggtagtttggaatattcttaccacttgcatccaagcccccacgaaggatcgcatgggctaaaggatttcctgatgtttccactgcttgggcattgaacaaaaagttttggggatgttgggctgcataaatcgcattgaacatgacagaaagatttccagaggttggattcttcatgcctgtcggagcagagatcccactagatacaaagcggtgctcctggtcttcaactgaacgagctccaatggcatgataagaaattaaatcctcaacataaggaagacttgctggataaagcaactcatccgcagttgtcaaaccagtctcggtaatcacacggtagtggagatgtcggactgctttcaaaccgtccacaaagcttggtgctgcatgtgtatctggttggtgcatcaagcctttatagccatccccattggtccgaggtttagccgtatagacccgcatcacaatgaaaatctgatctttgacttgctcttgtaagtctgccaagcgacgggcatagtccatcacagcttcttcattatcagaagagcaaggtccgatcacaagaaggatccgttggtcttctcctttgataatagcttccaattctcgatcacgcgcttctttgcgctccaaggctggaccttccaagcggtaaagcgaagtgatctcttgctcatcaatctttttgctcttcgtaatgaataccatacggcctccttatgctacctagacccatcctctttctatttcagaggagctcttaaaatttacgtccgtgacagtttttaaatttcttacctgaaccacaaggacacaaatcgttgcgtttcacttgtgacaagtcaatatctgctggaatatcttgttgttgcgctgcaatgttgcgagtcgcagttgttgaaatactgtgttccgtacgtggacgttcttgttcgtgaatttgggctttcatcatgagacgagtcacatcaaattcaatcgatccgatcatatcgttaaacatacggaaactttctgattggtattctaccactgggttattttgcgcatacccacggagtccaaccgcatttcgcaattgatccaaagcatcgatatggtctgtccacttgctgtccaccacacgaaggatcaagaccttttggaattcttgcacagactcttcgtcacgcaatttcgctacttggctagcatagatttcttctgcacgtgcatacaagtaatcgataacttccttgtcagattttccttcaatatcgcttgcagaaatcgtatcttccggaaccaaattgtatttggcaaagttcagaatcgcttcaacgcgttcttccttgcttgagtggctggccccttcaacaatccgtttgatggtccgtttgatcatggccttgatttcaggtgccaagtcacggttagctgtgataacatcatagcgttcagcgtagataatttcccgttgttcccgcatcacgtcatcgtattgaaggacttgtttacgggtatcgtagttgtttccttcaacccgtttttgtgcaccctctacttgacgtgtgaacatatttgaacggatcaccgattcttcttcgctcaacttgaagcgatcaagcactgctttgatccgttcagaaccgaaacggcgcatcaattcatcttcaagagacaagtagaattgagattcacctggatccccttgacgtcctgaacgtccacgaagctggttatcaatccgacggctttcgtgacgttctgtcccgatgacacacagtccaccgagttcgcgaacaccttcaccaagcttgatatcggtaccacgcccggccatgttggtcgcgatggtaacagcaccacgttgaccagcgttcatgatgatttgcgcttctttgtagtggtttttcgcattcaaaacttcgtgagggacacctgcttgaaccaacaattgagaaaggtaatcactggtttcaacggcaacggtacctacaaggactggttgccctttttcatgacgagacttgacatcttctacaacagccttaaattttgatttcaagcttgggtagagaaggtctggatggtcaatacgggcaatcggacggttggttggaattggaatcacgcgaatgttataaatttcacggaattcttcttcttcggttttccctgtccctgtcatccctgacaacttcttgtacatacggaagaggttttggtaagtaatcgatgcagatgttttggtttcttcttgaactggaacaccttctttggcttcaatcgcttggtgaagtccatcagaatagcgacgtccttccatggtccgaccagtaaattggtcgacgatcaagatttcttgatcttcgctgaccacatagtcgatatccaaaatcatgatgtagttggcacgaagggcattgtcgataaagtgagtcaaagctacgttttcaatatcgtacaagttttcaagattaaagtagctttctgccttatcaatccctgaatcagacaaaccgatggttttagatgggacgtcgataatgtaatcatcctcgtttaaggtcttcacataagcatccgccatgtggtagagctggctcgtatcagaagctgtctgaccagaaacgatcaacggagtacgcgcttcgtcaatcaagatcgagtctacctcatcgaccaaggcatagttcaatggacgttgaaccatgttttctgcacgcacaaccatgttgtcacgcaagtagtcaaaaccaatctctgagttggttgagtaagtgatatcacagaggtaagcttcttttttctcagctggagattttgctgcaaggttgatccctactgaaaggccaagccatgagtaaagttctcccatctctgttgcatcccgctcggtcaagtattcattgacggtgacaacgtgcacccctttgccagacaaggcattcaagtataccggcatggttgctgtcaaggtttttccttcccctgtacgcatctctggaacgtcaccatggtgaaggacgattccccccatgacctgaaccttgtatgggaacaaaccaagaacccgttttgcagcttcacgaacaactgcaaaagcctcgtacaagagatcatccaaagactcaccatcttggtagcgttgcttaaactcaactgttttcgcttttaattcgtcatccgtcaaagctgccatttggtcttcataagaaaagaccttgtcagccattttttcaaggcgtttgatttcgcctcgatcattttcaataattgtttttaataaatttgccatttttttccttactttgaatttttcaaaatctaaaatgttctttttattctagcattttttaaacattttttcaagatcaaggctgtatcttacaagactttcgagtggtttttttcgtgtgagaaaatccaaaaagatgcctgcttaagcagacatcttttctttaggcgatcgttattcagacaaatggtaagaatagcttgccacaaccacttcttcatgccaacgaagtgcatacttcaatttcaaactcatttggttgtggagaacattttgccaatgttttttaggaataaattgagggactaagactgtaacagtgttccctttttccttggcctcctcagctacttttgagacaaattcaaccgttggttggataatatctcggtaactcgtcatgacattttcaaagcgaatatgagggaaataacgcttaaattcttctgctacctcagcgtctttaaccttggtttcttccgttgagacgtgcatagctataacatcttttcctaggctatttgcataactcatagctcccacacttacttgagtgacattcccaacaagaacaatgacagtattgcccgcgtaatttgtcttttcgatcttccttcccaaacgcaattgagccgcaactttatcatagtgattacggatacttaagaacatccaaagcaagagaccaataatagggaagaagggccagatctcacccaaacggaataataagaggatcaagacaatcccataacagatggctgcccccaggatattggcaagggaatacttaagaaatcctttttgatattggcgtttccaatgaatgaccatccctgtttgagaaagggcaaaaggaatgaagaccccaatggtatacagcggaatcaagctttctgtttgtccatcaaaaatcaagagcaagacgatggcaccaatcgccaaggtcaaaatcccattagaatagcccagacgatcccctttttccatatacatgtgtggcatgtatttatttttagccatgttaaaggccaacattggaaaggcagagaatcctgtattagccgcaactgccaaaatcaaggctgttgacaattggaagacgtaaaagaaggcttgtccgactggggaattccctaagatggcttgggccatttgggctagagtcgttaccccttttgctggaacgacacccacccagtaattgaggaaggtaattcccgcaaacatgatccccaaaatcaaagccataatggtcaaggtagaggctgcattctttgcttttggtttcttaaagaaaggaaccgaattggagatagcttcaacccctgttagggaagccgatccactcgtaaaggcccgcaacaagagaatgacactaacccctgaaatggtttgacccacatgagcagttgcgttataggccaagtgacccgtcaagatttggatcacaccatagccgatcaaggcaatggtactgacaatgaaaaggtaaaccggaatcatcaatgatgtggccgattcgcgtagcccccgaaggttcatcagcatcaagatcaagaccaataaaatggaaatgtgaagattataaggatgaagagatggaatcgctgacgtaatggcatctgcaccggaagacacagatactgctactgtcagcatgtagtcgactaagagactcccaccagcgatcaaacccgctttgggagacaagttctccgtagtcaccatgtaggcccctcccccttgagggtaggcatgaatgacctggcgataagaaatcgttaaactggctaggagaaccaggaccacaatcccaatcggaatagaccaccaaatggctcccgctgaaacggtcatcaagaccaggataacttgctctggaccgtaggcgatagaagaaagcgcgtcactagagagcatggccaaggcctgcattttccctagcaatccgccttcaccttctgcaccagatttcaacggacggccaataaaccattttttcaatgttgaaaacataaaaaactccttgaaaaaagatcatgaggccgggagttccctgcctctttttcataaaacaggggttattctactcctttttttcaagactgtcaactaaaattgtgaaattttcataaaactttcattatgttcattcattcaagctctcttagatcagccagcttcttttcaaattgatccaagcaaaaaacgaggctgggacaaaagtcctagcctctcaattgtttttggattgtcgagcaagacgcagtggttgagtgggctctactacgctgatttcatcagcttttacagccctactcaactgtgcggaggtgggacgacgaaatcgaattctaacgaatgaccgatttctgtcccactcacacttttttattttgcttgattttcgacataaaaggcaatgacatccgaagtgtactgggctgtgccaactccaaacttgtcgatgttttccttgaattctggattatagacatagcctttgccgatatggccaaaaacttctatagagcagtcaaatccatacgttcgaatcgcgtctaaaagtttggcggcttgatcttggttttcatttgcagatacggatagaccatctttgagattttgcgccaaagtttgaaaaacttggttgaaggcttccgtagcctcatcttcacgccccttttgacgttcaagcgcttgatccatgacttcttgaccgtacttatctaccgcctcttgctggtatttttgagtatcttggtagctaaatccagtaaatttttcctcaatggtcatttttctttctcctttttgttcttgaatggttttttgcaaggtagaaatcaaggtatccagacgttgtctttcttgagtcaaatagtccaactgtttggtcaaatggggcaataagttagatttttcttcggctaagagttctgctatttggtctaaggaaaatcctagatacttgtagtagagaatcacctgtaatcgttctaaatcttcttgattgtatgtccgatagccattttcagatttcacagggacgagaagtcctatcttgtcatagtggtgcaaggtcttgacagagacacctgacagctctgcagcttctttgatatggtacatgatttcctccttatactcaatgaaaatcaaagagcaaactaggaagctagccgcaggttgctcaaagcactgctttgaggttgtagatagaactgacgaagtcagtaacatatatacggtaaggcgacgctgacgtggtttgaatttgattttcgaagagtattacaaggatagtataacccctccccttaggtcagagtcaagacttaacataaaaattgttttcagataaaaaaggcttgagttgttccacaacttttaactcaaaccctttcttttttatggatgactcacgatcaattctaaaccttgcccttccaaagtccaagattcaacatcgctcggtaagataaagtgacttcctttttgaataggataatccttcccatctaccgtcaatttcccttctccggctaagacgctcaacaagctgtaatcagcggtcttttcaaaatcagcttttccagtcagttcccacttataaacagtgaagaaatcactggcaaccaaggtggtcatacgaagatcatcgatcacaactgtatctggatggctattggcaggctctccaatgttcaagacatcaattgatttttcaagatgaagctcccgcaagtttccttgagcatccttgcggtcaaaatcataaacccggtaggtggtatcactcgactgttgggtttcaaggatcaagattccagatccaatcgcgtgcatggtcccgcttggcacatagaagaaatctccagccttgacaggaacctttgtcagtaaggcatcccagttcttgtcctcaatttgctgacggagttcttcttttgacttggcattgtgtccatagataatctcggacccttcatcggccgcaatcacataccaacactcggtttttccaagttctccttcatgctccatcgcataggtatcatctgggtgcacctgtacactaagccaatcgttggcatccaaaatctttgttaataaaggaaagacaggctctttacgattaccgaataattcccggtgttcttgatagagctggtccaatcccattccttcgtatggaccattggtcactttagaaacgccatgcggatgggccgaaatcgcccaaaattccccgacatggtcgctcggaatttcgtaaccaaattcttctttcagacgagttcctccccaaattttttcctgcatgactgaatgtaaaaataatggttgtcccataatatcctcctcgcatttcatgtttctattatacaaaaaaaagaaagtttttgaaagccctttccattattttcctctctcgccagaaacttcatttttgtgtataatgaaagggatgacactaaaagaaaacattatccaactggcgcattctattgggatatcaaaaattggctttacaactgctgatgacttcgcttatttggaaaaatcgctccgcttggccgttgaggaaggacggaattctggattcgagcataagaatattgaagagcgcatccaccccaaattaagtctctcctctgccaagaccatcatctcaatcgctgtcgcctacccccacaaactcaagcaacaacctcaaaaaacagcctataaaagaggaaaatttacgcccaacagttggggattagactaccattatgttcttcaagacaagctcaaccgcttagctgctgggattgaagaaatgacgcaggattttgaatataagggcatggtcgatactggagcactggttgatacggctgtcgcccaacgagcagggattggctttatcggaaaaaatggcttggtcatttcaaaagaatacggttcttacatgtttctgggcgaattgattaccaacctcgaaatcgaaccggatcagccagtcgactatggttgtggagactgtcggcgttgtttagatgcttgcccaacctcctgtttaatcggggatggctctatgaatgccaaacgctgtttgtccttccaaacccaagacaagggcatgatggacctagaatttcgcaagaaaattaaaacggtcatctatggatgtgatatttgtcagattagttgcccttataacaaagggctagataatcccttagcaacggaaatcgatcctgatctggctcatccagagttgattccttttatcgagctgtccaacggacaatttaaggaaaaattcggacatgttgctggaagttggcgaggaaagaatatcctccagcgcaatgccatcattgcattagccaatgccaatgaccgctcggccattcctaagctcctgaacatcatcgaaacttcacaaaatcagattcatattgcaacggctatctggtctttagggcaactgctccgtgaagtcacgccagaccttgttgagctcttacggaatatcaaacatccgaccgatgctatcatagaagaacgaactgctttctttgaaaaattcggcattcaagcagattcacagctacaatgaaaaaatactaagattgtaaccttagtgtgaaggcgtatacaaattgctattttatacaaatctattaacttctgtaaaaataaaaaaatttattcgttagaattattcaatcatcaactgaaactttccgacgtgagaaaagctcttgaaacttaatagtttcaagagctcgggagttttgagaccttaggctcaaaactaagtcatggaacttcttcgaagttcgctgacgtccgtagtcacctaaggaaagtttctaaaatgactttgtcatcaatctgacactaaggttgtatccttagtgtttttttagttctttcaagaaataccaactacccatctctacttggttaaagcaaatctcacttgaatagacttccttgtaaccatttttcgtgtaaaaatagacatttcctttggtattggtataaaaggctagtttttttccttggatctcttccaagaaaggctcaattccttctatcataaagcgactgccatagccctgccgttggtgtttaggggcgactgcaagaagcatcaaataccaatcaaaatctacattttgctccaattccttatccgtgtcctccataaatttaaagtaggacaacatatttttcaaggaaataaacttgagcaaaccgaatcccccatttaagagataggcccgaaaagggatcggttccttttgcaacaaggcaactgcataaatttcatcatttttttctgccacaaggcaaatatggtgcttaagaaaaacctttaccaggatgcgcatcattgcctcaacaaaggatgggtattgcttgggatcccgaaccaaatccttgataacttttaaaaatagatagtcctcaaaggctgtactggctactcgaaccacctgatccagatctgctttttctgcttttctgtacttcatcttctctcctattctaagtccactttccagtatacactatccctcgctcttagacaaaggtcaattttcagcaatttgttcattcaagccagcaaaaagagtcctccccagacgagtcctagcccccaagcgacgagggcatccttgggataatgaactcctccaagaactcggacaagggctaatagaagagataggagcatggagcacattcctagcggaagagacaactggcagacacacatggagataatggtcgccgaaaaaacatgtcggctaggaaaggaatgaccggatgaatttttttctaataatggttgaatctcccatttttcataaggtcttggaacattgacccaatgacgaaagaggctaaacaagacaaaacccgaagcagggatccagataaaaggccagattcctcccattgaagttttctttaaaaacagccaacaaaagaccaggccgtagatgcctggcatggcgaacgtcaagattcgattcgtcctttgaaggacctgcacacgatgtggttttctcgtaaaaggcagggttagccaacgataaaatttcggataatcttgaagattgggcttcatgtcggcactcctgtctttcatcttattttatactactagtatacgcgatcctaagaaagcctgtcaagccaggcttattttttatcctttctttcttctttttcacatgatttagcactaaaatctgatgatttatcatttttctgtctccaagaaacctcttttccattactattatcgataaagaaatgaggctgggacaaaagtcctagcctctcaattatttttggattgtcgagcaagacgcagtggttgagtgggctctactacgctgatttcatcagcttttacacccctactcaactgtgcggaggtgggacaacgaaatcgaattctaacgaattaccgatttctgtcccactctcattttttcactttgtatgttacgccctttgtatcttgttggaattgcgacaggacgaaggtggatcgatattatccacctgaggagttagtgagtcgtgtcggcaaggcaccattgtgctttccattacacgaattgaacacgccctaaatgctgtgtgaaaaacgctaactatactagcactaacttccagacacagtagctgattgaactcttctctcgcttgataagctcggaagaattctaatcagccttgtgggggtaggacgacgaagcgtccacaatcgtatagcttctgtcctactccctattttcactttgcattttacgggctttgtttcttgatttcatgctacttcttctgtgaattggctattgtagagatcagcatagaatccattttggctcatgagctcttggtgattaccctgctcgataatatttccatctttcatcacgagaatcagatccgcattacgaatagtggacaagcgatgggcaatgacaaaggaggtccggccttccatgagtttgtccatagctttttgaatcaactcttctgtacgggtatcgacagatgaggttgcttcatccaagataagaagcggagcatccttcaagagggcacgcgcaatggtcaagagttgcttttgacccacggacaaggtcactgaatcatctaatacagtatcatagccattcggcaaggtccgaataaagtgatggaccccaaccgctcgggttgctgcttccaccgcttcgtctgaaatatccgtttgattgaagaccaggttttctcgaatggtcccctcaaatagccaggtatcttgcaagaccatcgaaaaggcatcatgaacttcttctcggctcatggccttagtatccacaccatcgatggtaattttaccagcttgaatgtcgtaaaaacgcatcaagagattgaccatggtcgtcttacctgcacctgtcggaccaacaatggccaccttctgtcctggcttagcttcagctgtaaagtcatggataatagtcttatctggtgaataaccaaagcgaacatgttcaaaggtaacatgaccttttggcacttccaattggcgtgttttttgggattcatcttccatttcttcttcgtctaagaattcaaagacacgccccatagcagcactagctgattgcaattgggtaatgccttgagccatttgactaattggttgggtaaagatgcggacataggtcataaaggcaacaatggtcccgatggtaatgtctccattaatggtgaggacagccccaacgatacagaccatgacatagccgaaattccctacaaactgcatcaagggcatcatgatcccagagaagaattgggatttccacatgctatggtacaaatcttggttgatggcatcaaaatgatttttggcttggtgacggccattgtaggaaatgacgatattgtggccactatagatttcttcaacataacctgaaactttggcaaggttgtcctgttgttgcttaaagagaggctggctcttgaccataatgatgctggaaagagcaaaacctgcaaagacggacacaatcgctgtcaccgccaagtgccagtccgtcttaaacatcataaggatggagccaatcaataagacaatagaagagaccatttgaaccaagctttggttaaaggattgggtcatcaaatccacgtcattggtcacacgagacaaggtatctccttgttcatggctatcaaaatattggaggggcacgcgattgatcttctcagcaatggcattgcgcaagcgttctgcaaagcgctgaatcatggttgagataatgaaactactgctgtaggacaccagtgctccaactccataaaggatggctaaggtcagggcaatcgaagtgatcttatcaatatcaatggcgcctcccatcccttttgtaatggtatctgtaatttcttttaacttatccggtccaataaccgtgattacactcgatacgatcgaaaagaggatagcaattaggaaaaataggtggaagcccttcaaatagggagaaagttggctccaaagggatgttttttgttttgtcttatgcatgttccaactcctccttagataattgtgaataggcaatttcttgatagacttcattggtcgcaagcaattccttgtgggtaccttgaccgacgaccttcccttgatccaagaccaaaatcaaatctgcatccataatagtcgaaatccgttgggcaacgatcaatttggtcgtatctgcaagctcttctttcaaggcttgtcgcaggatccgatctgttttataatctagagctgagaaggaatcatcaaagatgaggatctcaggtttgcgagccagggcccgtgcaatggccaagcgttgccgttgaccgccagagaagttgcttcctccttgcgctacttctgtatccaagcctttttcttttgcggccacaaactctttggcttgggccaattcaagagctttccagatggcttcatcctctaattttccttgactactttctccaaattccatattggagcgaatagtgccgctaaagagcactgctttttggggaatatagccgactttattattcagttcttggtggctataattcttgacattgatgccatccactaagatctttccttctgttgcatcgtaaaagcgcggaatcaagttgaccaaagtggatttcccagaaccggttgatccgatgaaggcaacggtttgtcctttctgagctgagaaggtcacatgttcaatcacagcacgggaagtccgtccatatcggaaggaaacatcttgaaattcaacggtaccctcttggcctgttgtttcttttgactcacttgggaaggctacagacggctctaaagctaagacctggttgattcgtttggcagataccaaggcacgaggaagaataatcaagatggccaccatcatcataaagccaacgacaacctgcatggcgtaagaggagaaggtgatcatatcggagaagaccttggtccgatccgctaatgcaggactggtgaagatctttgtaggatcttttggcatggcgatatcattgatcaagtgcgccccaatccagtagatagcaagggtcaacccacttgataccactgtcatgacagggttcatcaaagacatcaaacgataaacaaagagatttagacgggttaagcccttgttttcagcctggaatttctcattttgataagcttctgcattgtaggcgcgaaccactcgcaccccagtcaaactctcccgtgtcgtcgcattcaaagcatcggtcaaaccttgaaccttttgctggcgcggaaaggcaataagaaccagaacagagagaagaatcaagaccatcaagaccgcaatcccaacagacgttgtccaggcactgctcttcccccaaatcttggtcagagcccaaatcgccataatgggaccacgcgtcacaacttgcatccccatgacaatcatgatttgtaactgggtcaaatcattggttgtacgagtcaagagagagggaacggagaatttcttgatctcggcatcagagtaatccatcacttgatggaaaatctctcctcgaagtcgcgtcgtaaagctggcagcgactcttgaagccaaaaagcccacaaaaactgccatcaaaaagcttccaaaagagaagagcaacatcttgcttcccggatccataatatcagaaaccttggtcccatccttggctaagagggtcgtgatatcggataagtattcaggagtctttaaatccatccaaacagccagacagataaagaccgtactaagggcaatcatgccccattctttggcagttaaccgccgaaatatattgatcattcctcgctcctttttttcatattctcataaaattgatgcatgaccctgaaaaagatggccaattcttcttctgatacaccagccatcatatcctggtccacttcttcaaagaattgtttcatgtcattcaatttatcttttacactgtctgttaggtagacatacttggcccgtttatcggttggactaggctctagataaataaagccatttttctccatgcgcttgatcaggttactcgtcacggattttgagatatgaagttcctgctcaacatcccgaatcaaggtcactttcccctccttttcacgatgagataaaaagcccaatacctgaccttggggtcctgcgctaaattcaagccctctcttcttggcctctctttctaccatgaggtgaatgagatgaccgatttttttaaattctagtaaaggtttgtccatcatttcctccaaatagttctcttaagaactttaaagttactatgagaactattttaacacaaaaaagatccctgtcaagaaaaaagtttccataagaactaaaaaaaggagccgaatcgactccatccttcatctttagataataatgccttctagatgatccatttcatgctgacagatctgggccggaaagcctgacaaatgaattgtttttgctttccaattcatatctcgataggccactgaaatctcctcataacgagtggtcggccgactccccaccaaggacaagcatccttcctctgtttggtaaggctttttcttttcaaggagaaccggattaaacaggaccaaattttcacttcccattcggatgataatcgctcgctttttcaccccgatcatattggctgctaaaccgacacactcaaggagatgagcatttaaggtgtcctgcaaatccaaagccaaggtgcgatcctcaggtgtcgcttcttctgacttttgacccaagaataagacatcttttacaatattctttttcattccttcctcacttcttgatagatagacgaaagaagagagtgggacagaaatcggtaattcgttagaattggatttcatcgtcccacctccgcacagttgagtagggctgtaaaagctgatgaaatcggcgtagtagagcccactcaaccactgcgtcttgctcgacaatccaaaaataattgagaggctaggacttttgtcccagcctcctcgctcttgtttctaacctctaagagacaattgctgcttattttttaagcttttcgctcacttcttttgcaaggacaaagttccccaaggtcgctgaaccattgccggcaactgcaggtgtcacaatataatctctcacatcaggtacagggaggtaaccgttcaagagggcagtaaatttcgtgcgaacacgatctaacatatgttgttgagccatgactcctcctccaaagacaatgacgtctgggcggaaggtaactgtcgcattcactgctgcttgtgcgatgtagtaggcttgaatatcccatacattgctgttgagttcaatgttttccccacgaatacccgtacgagcttcgagactaggaccagccgcaaaaccttccaaacagccattgtggaaaggacaaacacccttgaattctttttccacatccattgggtgttgggccacatagtagtgtcccatttctgggtgcccagctcccccgataaactcaccacgttggatgacaccagctccgattcctgttccgattgtatagtaaaccaagttttcgatatgaccacccgcattgttgcgtgcgaccacttctccataggcagaactattcacatctgttgtgaaatagataggtacattcaaggcacgacggaaggccccaacgatatctacattggcccaatttggttttggagtcgttgtgatgaaaccataagtgtttgaatttggatcgatatcaattggtccaaatgaaccaatcgcaagcccaactagatcctcaaattttgagaaaaattcaatacacttatcaatcgtctcaattggcttggttgttggaaattgtactttttccacaacattatagttttcatcaccaaccgcacaaacaaattttgtaccgccagcttccaaacttccatataattttgtcatgttggctccttttttattatgaaaaatatcctgtatttattatagcatattttgtagtcaatctttttctcttctctaaagaaaaaacacactttttttgagaaataaaattcaaggactggagatgatagaccagtccttgaaaacttattgtttcgattaagctttgacttcgatgatcgcatcacccttcgcaacagatccagttgcaacaggtgtgacagaagcatagtcagctgtgttagtgacgatcaccatagttgtgtcttcaagaccagctgcggcaattttcgctgcatcaaatgtaccaaggacatcaccagctttcactttatcaccttgagctactttttgatcaaatccttcaccgttcattgatacggtatcaatcccaacgtggatcaagatttcagcaccattagcggtcttcaaaccgtaagcgtgaccagttgcaaaagcaatggttacttcagcatcagctggtgcatagacaacgccttcagttggtttgatggcaattccttgtcccatcgctccacttgagaagacaggatcattcacatcagacaaagcaacagcttgaccaacgatcggagagataatggtttcgtcttgaagagatgctggaagagctccagttgtttcttcttcaataatagcttctgcttctttgtcctctgcaggaactgatgaagcttcatcttcataaccaaacatataagtcaaaccgaaacttagggcagttgtaaatacaaccataaatacatatttcaataattgaccgtttagatagagaagcgttcctggaataattgtaataccaaatcctgtaccagcaagatttaacatagatgcaatccaaccacctactgcacctgctcccaaagcaataacgaatggtttcacataacgcaagtttacaccaaagattgcaggctcagtaatacctaacaaggcagagatagttgcaggaaatgctagagctttcactttttgagatttagatttcactgccactgctaaagtagctccagcttgtgcagtcatagccgctgtaataattgcattaaatggatcttttttatctgcagtaattaattgtgattcaagaagattaaagatatgatggacgccggtaacgacaatcaactgatgaacgccaccaataagaagacctgcaagaccaaatggtaaattcaaaataaacttagttacatttagtacatattcttcgatactgtggaagaatggaccaataataaacaaagcgaggaatgacatgattgtcaatgtgaataatggaaccaataacaaatctaagacatctggaattttcttatggagccacttttcaagtttcgcaccaattagaccaacgaagaaagcgggaagaactgagttctggaatccaaccacatgatggaagataccaaagtatgttgctgctttagaaggatcttccgctacaacccacgcatttggaagtgtcggactaaccatcatcaaaccaattacaatcccaagaacaggatttcctccgaatactcggaatgcagaccatgaaatcaaggctgggaagaaggcaaacgcggtatcagttaaaattgttgaataggtataaaaatcagtagatttaaatgcatctgctgttgtgccaaacaaagccaaaacctggtcttgagcaatggcaccacgaatccccataaacaatccagtcgcaacaattgctggtagaattggaacaaaaacgtctccaaaggtacggatcgcgcgttggaaccagtttccttgtttagcggcttctgctttcatttcatcttttgatgatgttggtaagccaagagctactacttcatcatagatcttgtttacagtaccagtaccaaagatgatttggtattgacctgagttaaagaaagcaccttgtactttttcaatgttctcaacaacatctttgttgatttttgattcatcttttaccatcacgcgaagacgagtcgcacagtgagcaacactgctaacgttctcaaccccaccgattgcatcgatgacctgctttgcaatttctgtatttgacattttgcaaaaatctccttattttttgtaatgtaaacggttaaatcgtttctacgtttttaattgtaccacgtattgaaaatatgtcaagcgttttacaggatttttttgaaacttttttggactttttgacaccttttgacagcatgaaattattttcattttaaaacagacctataatacgctttttagcgctttgattcagtcttttattttcattttctttcattttttcatggattttcaacttctcctcttttctccaaggcacaaaatagatgtcaagcgtttgacattttttgccatttttttcatttatcgcttgcatttttaataggaaatcggtactatggaagtaagaaaaaagttcggaggaataaaatggaatggacaactgaacgtcgttacagacgttacgaagactggacagaagatgaaaagcaagccatccaagatcatatggccaaatctccttggcatacacactatcatgttgagccaaaagctggtctcttaaatgatcctaacggtttttcctactttgatggaaaatggatcttgttttaccaaaatttcccatttggtgcagcccatgggttaaaatcatgggtacaaacagaaagtgaagacttggttcatttcaaagaaactggtgtaacgcttcttccagacacagatctggatagccatggagcttattctggatcagccatgcagtttggtgacaaactattcttattctacactggaaatgttcgtgatgcagaatgggttcgtcatccttaccaagtcggtgctttgatggacaaagacggaaagattgaaaaaattgacaaaattttgattgatcaaccagctgactctacgggtcacttccgtgacccacagatttttaactttaaggggcaatactacactatcgtcggtggtcaagaccttgagaagaaaggattcatccgtctctataaggctgtagataacgactataccaactgggttgcagtcggtgacttggattttgcaaacgatcggacagcttatatgatggaatgtcccaacctagtctttgttggagatcaacccgttctcctctactgtcctcaaggcttagataaatcggtcctcgattatgacaatatctatccaaatatgtacaagatcggggcaagctttgacccagaaaaggccgaaatggtcgatgtatccgaattgcataatctcgactatggttttgaagcctatgcgactcaaggatttaatgcacccgatggacgcgcctatgctgttagctggctaggtcttcctgatgtttcttatccaacagattcctatgactaccaaggagctctctcactggtcaaagaattaaccatcaaagacggcaagctctaccaatacccagttgaagcgatcaaggacttgcgagctgagtgtgaggcatttgccaacaaggcacaaaccaagaactgctatgaattggaattgcagtttgaaaaagatagccaaaacgaaatcgtcctctttgcagatgcagaaggaaagggcttagttctcacatttgatctggctaaaggattagtcacagtcgatcgtagccaggcaggtgagcaatatgcccaagaattcggtacgagccgtagctgcccaatcgctaaccaagccacaaccgctaatattttcattgacaattcaatttttgaaatctttatcaataaaggagaaaaagtattttctggtcgggtctacccacatgcggatcaaaatggaatattgatcaagtctggaaaccctactggaacttactacgaacttgattatggtcgcaaagctaactgatgtcgccaaactcgccggtgtcagccctactactgtctcacgggtcatcaataaaaaaggatacctgtctgaaaaaacgatccaaaaagtccaagaagccatgcgagaattgggctataaacctaacaatgttgctcgtagcctccaaggaaaatcagccaagttagtcggcttgatctttcccaacatcagcaatgttttctatgctgaattaatcgacaaactagagcaccaactcttcaaacacggctataaaaccatcatctgcaatagtgaacacgactccgaaaaagagcgcgaatatattgagatgttggaggctaaccaggtagatggcatcatttcaggaagtcataatttgggcattgaagattacaaccgggtaactgctcctatcattgcttttgaccgcaacctctccccagaaattccggttgtctcttcagacaactacgctggcggggtgcttgcagcagaaactttagtaaaaaccggagcccgaaatattatcatgatcacagggaatgacaactccaactccccaacaggcttgcgtcatgcggggtttgcatcggttctacctgagtccatgatcattaatgtttccagtgatttctcccctattcgcaaagaaatggaaatcaaacagattttaacccaccacaaaccagatgccattttcgcctccgatgatttgacggcgatcttgatcatgaaagtcgctagagaattagatattcagattccccaggatttgaaagtgattggttatgatggaacccagttcattgagacctatacacctgaactgacaaccatccaacaacccctcgaagacattgctatcctcatggtggatcttttactccaaaagatcgaaggaaaaaaagtagcgactaccggttatttcttgcccgttagtctccactctggaaaaagtgtctaaaacaacccctacagttctattactgtaggggttgttattcgtcaaaaaaaggctggacaaaaactgtctagccttttatatttaatagaaataactgtatgacgcagtggttgattggcatctttgttcgccttttaagctccaaagatgacctaatcaactgtgcgggggtgggaaaacgaactcttttaactagttggagttctttcccactccctttttacttattcttctgtcacaaattgactgaggacaccgttgacaaatcgtgaagaggtttcatctgaaaaggccttggccaattccaccgcttcattgactgcgacgatctgtggtgtatcaaactctgtcatttcgtaaattcccagacgaaggatgtttttctctaccaaggtcaagcgctcaacagtccagccggttttcaaatgttgaccgatttgctggtccagttgatctttggattggtagacacccgtcacgagattcatgagaaaggcaggaagatcgacttctttgtcttctgctaggtccttatcatgtagataagcaaaacgacaagcttcaacaatgtctccatcgtattccaaggccatcaaggcttggaaggcgcgctcacgcaaatctcgacgtgattctaataaaatttcatcagtcattgaggaagtcctcattaaacaaatctttcaagtctggttttggagatttttccgttgcgataccaacaacgtgaatgttgacagcatccaaggttacatctgccatatcataaactgcagacttgaccgctttttgaatggctacagcgacagatggtacagccactccgtattctaaatagagatagatgtctactgaaacttgaccatcttcttctgtatgaaggtagacgccacgtccaagggagcgtttggataagctatctgaaacactcttgttttcaagcgaatagacaccctctacttttgctgtcgcaatcgcaataattttttctaatacacgtggtgcaataacgatgtcaccaaattgttcagttgccatagaagttcctttctatttgacaccctgagatgtctcttatgcacgagaaacgtaagttccttcagtagtgttaatgaccaatttttgtccagcttcgatgaagtcaggaacgtttacgaccaaaccagtttccattgtagcaggtttaccagaaccagtcactgtagcacctttgatagatggttgagtttctgcaacagttaattcaacagttgtaggaactgttacaccgattacttcgcttccgtagaattgaatttttacttctgagttttcaaggatgtaaagcaattcttgttctacgttcacaactggaatttcatattggtcatatgtttcagtgttcatgaagtaggctgtatcatccattttgtacaagtattgagctggaacagtttcgataatcgcttgttcaaatttttcttctggacggtagcttgtatcaaatgttgaaccagtacggacatcacgcaatttcatacgcatgatagtgtttcctttacctggtttgtggtggctagcttccaaaacgcggatcaattttccgtcagctgtttcaaaagtcataccagctttcaatttacttgcttcgatcatgttttattacctcttttttaaaaatagattactctttattgtaacacactatttgatttttctcaaacagcaattttctctttttcggaaggctagaaggcggagagagattacaggaacgagtccttagaatctctatatctccaactccatcttcactattccttattggtccacaggcacaatattaccatccgcatctttggtgacatggacatattttccatctacttcaatgtagaaggtatgtggcttgtcttgagctggagaggcttgtttttgaaggtcattaccaagggattgacccaaattcatccccatgatcatgttcatgccattgccaccttcatttttagcagctgcgaccaaagcttcattgcgagcacgacgttcttcgatttcaatggtattgtacttcatcgccgccaattcactgtccagtttattgaccttggccatactgtctgcatcatagctcaaatcttcaatgaggacattggttaattcgataccatataattctgtccaagttttgttgacttcgcgttttgcaacttcattaaaaacatcttggtccgcattgatgttgtaaatatccgccttattttctgctgtatattttgaaatggccactgcaatttttggagcgaggttttggcgcaaggttccctgagctacatcttccaaggtaaaaggtttatctgccgtaatttggcgactgactgcactgacatagaaaagaaccggatctgctattttgacatcatagagaccataaaagcgaatgctcagaagctgttggtaacggtcgctaaagtactcaactggattttgagtgccaaatttatttcctgtaaaaggttgcatccgcacaaaaataatttcttgttgggtgaccacttggcctccaaatgagaaacgattcttgaactgatcccacgttcctttcacaccacccttttcaaacaaccaggcattttcaccggcttgccattcgtgactccctgcttctagaaggtctcctagaaacgttccattattgaccaagagagcaacatagccttggggaacaatgacaacagagccatctgtcaatagacccgtattttggttgctctgacgagagcgcccatctggatctttggtcaagagctgtcccttaatggccaaagctgttgctggaacagcttccggcaaggtaatggcttccttaaatttactatcttgaaaacttgaaatgcccgctgaaagggctgctttaataaatcccatacattctcctatctgtagaattcaatttcatccacaacttcgtagacatccaagacccaatcttttggattgtgcttcaaggatgcttggcaatattcacacttgtcgattgaatcgatcgttagtggcgcaccacagttcggacagtgatcactaacgacttctgaattcttaatgatctctgtctgggctccatgttcacggaggaagaccatgcggtaaacggtaaagagatctttggttggatccccttcgatcacacgacccgtttcatcatttcgaatgtaatctctcatcgtcgaagacagaatgacttcaatgcggtcattgccttctggattttcgataaagtctttgatcttcgaatcttccacacatacgcgctctagaacattggttgttttggcacgaatatgctcttgtaactgcgtcaagtgctgctcataaagactcgtactttctaagttccgcacagaattccaatctttttctgtccaggcagactgcaattgaagataaaccagcttaacttgcgacaagaagcggtcttcatcaaacattggatccagtttacggatgcggcgaatcgcttcatagttattttcaattggtcgaccggcccgctcttcggttgtccgttttggaccactatttgaagagaatgattcatcactatcattagcctcttttgcaatattatagataaatccaatcaatccaacgatagcaaaaactgccactacaccaccagagtctgttccagaactagaactgtagctactggatccaccagaccagctgctgccaccagaccaactacttccgccatcggaccagctactgccactatcggaccaactgctaccgccacctgaatcaatcaagctactgccaccactatctgtattaccaacaccagcatgggcagaaggagcaaatacaaatagcaggactactagaagaattccaactattacacttcgttttttcataggcctcttttcttatctttgtttgttacacaggggttaagaaaatactgtctattttataggacaatcaattctttaggagcaagagtcaagacttcacagcctgtttctgtgatcaagaggtcatcttcgatccgcacaccagagaggccttcgatataaatccctggctcatctgtcaagaccatccctgcttgaatcgcttctttagacgtttggctgaagtatggttcttcgtggatatctagcccaattccatgaccgattccatgagtaaagtattgaccatagccggctgcctcgatcacatcacgtgggattttatcaaaatcacggaagccaagtccatctttagccgcagcaatcaaggcttgattggctttcaaaactgtttcgtaaatttctctttccttgtcgctgacatgtcctgcatagatagtccgtgtcatatcactgacatagtgatcatacaagcaaccaaaatcaagggtcaaggcatctcctgctgaaatgacccgatcacttggagtcgcgtgaggcatggcagagcgttcaccagctgctgaaataatatcgaaagatacaccagaagctcccaactcccgcattctaaaatcgaggaaagtcgctgcttccaactctgtcgttttccctaccttaatatagtctaaaatatcatggaaggcttggtcagagatgctacaagcttttttaatggccgcaatctccgtttcatctttaatcaagcgcaattccatgacaaagttcgctagagattgaaggctaatgccactgaaaacagaagccatacgggcatggtaggctaccgtcacttcgtcctcaaaaccaagttctttgatgccaaggtccttaacgatctctgcagctgcagtcaactcatcgcgggtttccacaatctctacaaaggggaaacaagtcgcatgggcatggatggtgtagcgcgaatctgtaaagaggaccacgcgttcttctgtcaccaaagcggtcccgtttgaaccccagaaattggtcaaataataaacatttttcaaattgttaatcaataccgctttgaggttttgggctttcattttgtttcttaagttgctgatccgttgattcattgtaattttcctttcaaatattgtcctgtgtagctagcaggatttgctgctacttcttctggtgttccggtcgcaataatggttccaccaccgacaccaccttctggtcctaaatcgatgatatggtctgctgtcttaatgacatccaaattgtgctcaatcacaaggaccgtattgccatcatccacaaatcgctctaagactttgatcaagcgagaaatgtcttcggtatggagtccggtcgttggttcatccaagatatagaaggattttcctgtagagcgcttgtgcaattcagaagccaacttcatccgttgcgcttccccacctgaaagggtggtcgctggttgccccagcgttacatagcccaagcccacatcttggatggtcttgagtttgcgttcaatttttggaatgtgcttgaagaattcaactgccttattgaccgtcatatccagcacttctgcaatatttttttccttgtagtggacttcgagggtctcactattgtaacgacgtccgtggcagacttcacaagggacgaagacatccggcaagaagtgcatttcaatcttgatgatcccatctcctgagcaggcttcacaacgcccgcccttgacattgaaactaaagcggccttttttatagccccgaattttggcttcattggtctgagcaaagagatcgcgaatatcatcaaagacgcctgtataggtcgctggattagaacgaggagtccgaccaatcgggctttgatcaatgtcaatcaagcgatcgatatgctcaatcccctgaatcgtcttgtatttccctggtttttccgaattgcggttgagcttttgagcgatggcttttttcaagatgccattgatcaaggtcgatttcccagaaccggaaactccagtgactgcgatgaatttgcccagaggaaagcgagctgtgatgtcttgtaagttgttctcactggctcctgtaatttcaatagaacgaccatttcctgaacggcgctctgttggaaccggaatcttgcgtttgccagacaagtactgacccgtgatggatttgctgttgcgagccacctgctttggagttcctgctgcaacgatctctcccccaaagacaccggcacctgggccgacgtcgatcaggtagtctgcctctctcatggtatcttcatcatgttcgacgacgatcaaggtgttgcctaaatcgcgcatcttcttgagactggcaatcaggcggtcattgtccctttgatggaggccaatagacggctcatccaagatataaaggacaccagagaggttggaaccgatctgggttgccaaacgaatacgctggctttctccacctgataaggtcccagccgatcgtgacagggtcaagtaattgagccccacattgtttaagaaggttaagcgatctttgatctcttttaggatcggtcttgcaatcgtggcttcattgtctgttaagatcagctgatccactgcttttaagtgatccgcaatcgaaagatctgacacttccccgatatgcatccccttttctcctccgacacgaacagagagagcttggtcattgagacggtagccgtggcaggtcgcacaggtcaattcgttcatataagagcgcatttggttgcgggtgaaatcactattggtctcacggaaacgacggtgaatgttgtttacgaccccttcaaaaggaatttcgatatcccgaaccccaccaaactcattttcatagtggaagtggaattccttgccatttgaaccatagaggaccaagtccttttcttcttgagaaagatcggaaaaaggctggtccatatcaacgccaaaatggatcatggcttgctctaacatctgtggatagtagttggaagagatcggattccaaggagcaagtgctccttcacgaagggttaagcgatcatctggcaccaccaaatccaagtccacctctagcttaatgcccagcccatcacagtctggacaagatccaaaaggcgcattgaaagaaaagaggcggggctctaattcaggaacggtaaagccacagactgggcaagcataatgctcagaaaagagtagctccttgccatccatggtatcaatcaccacataaccatccgcaatccgaagagctgcttcaatcgaatcaaagagccgcgagcgaatgccctctttgatcacgattcggtccacaaccacttcaatcgtgtgctgcttgcttttagatagttctggaacctctgtcacatcatagatctcaccatcgacccgcacccggacatagccgtctttttgcaccttttcaatgatattcttgtgctggccttttttcttgcgaataataggagctagaatttgcaggcgttggcgctctggtaactctaagacttgatcgacaatttgctcaactgaagaagctgtaatcgctccatgcccattgatacaataaggcgtccctacacgcgcatagagcaagcgcaggtagtcattgatctctgttgccgtccccactgtagatcgggggtttttactggtcgttttttggtcgatggaaatagctggactcaagccgtcaatggagtccacatctggtttttccatatttcctaagaactgccgggcataggccgataagctctccacgtagcggcgctggccttctgcatagagggtatcaaaggccagactggactttccagaaccagacaaccccgtcaccacgaccaatttgtcccgtggaatttccacgtctatattttttaaattatgggcgcgtgccccatgaatgacaattttatcttgcatgttcttactctaatcacctttttgttaacctccattataacaaattttttagtattcttttatccaaaaccgtcctttttctgatataatgttaaggtgtaaaaaaacaaggggaggcaccatgaaacaggtctttttatcgacaacgactgaatttaaagaaatagagacgctggaacccggtagctggatcaaccttgttaacccttctcaaagtgaatcgatggaaatcgcctctgcttttaatattgatattgcagacttgcgggccccactcgatgcggaagaaatgtcccgtatgaccatcgaagatgagtataccttgattatcgtcgacgttcccatcaaggaagagcggaacaatcagacctactacgtgaccattccgctagggattatcctgacagaaggggctattatcacgacttgcttggagaaattgccacttctcgatatctttatcaaccgacgcttgcgcaatttctatacctttatgcggtcacgctttatctttcagatcctctatcgcaacgctgaactctacttgtcagcgcttcgtaccttggatcgcaaaagcgagcagattgaaagccaattgcacaaatcaacgcgtaatgaagagctgattgagttgatggagttggaaaaaaccatcgtctactttaaggcctctctgaaaaccaatgagcgcgtgatcaagaaattgaccagtgccaccagtaacatcaagaaatacctagaagacgaggatctgttggaagataccttgatcgaaacccagcaggccatcgagatggcagatatttatggaaatatcctgcactccatgaccgataccttcgcatcaatcatctccaacaaccagaacaacatcatgaagaccctggccctcgtcaccattgtcatgtccattccgaccatgatcttttcggcctacgggatgaacttcaaggacaatgagcttccgctcaatggcgaaccccatgctttctggctgattattttcatcgcctttgccctgaccgggtctctcgtcgtctacctcatccataaaaaatggttctaaccaaacttgtacatcaaaggagtaactatgtctcaaaccgaccttcatcaacttagtaagaaaaatcaagaatttatccggatcgccaaacaccaattgcttgaaaacggaaagacagaggaagaagcagaaagcctcatccaagaaattcttccagctatccatgagaaccaaggaaaaggaattccagcacggaccctttttggagctccaactgtttgggcgaactctttcagcgagaaagaacgctatgaaaaagagcatccgaaattaaacgatgctccctctctcatgattttggattccttcctctttatctttggtgtttttgctgcgattagcgcctttatgaacttggttgcaccgcgtcgtactggctatggtttgatcaccttgatccttggaagtttgacaggggctttgctcttatatctcatgtactacttcttctatcagtatatggatggcaccaaagatcgcagcgagcgtccttctctttggaaatccatgccgattcttgttggagtcatgttcctttgggtcattgtcttgtcctttacttccttactcccacaggttctcaacccaactattccagatgtcttcgccatcgttttaggagctttagcacttgtccttcgcttctacctcaagaaacgctttaatattaaaagttcgagcacagcacccgcaactcgacgctaaaaagaaacggatgaagttttcatccgtttttgttttactgtatttccctgttcaacctttttgaaaaatagaggactaagtcatcattgttttcacaagaactgtaaggggccaagggctgatccctaaaccaaactccagatccatctgggatatagccccgtttgacatacagtctttgagctgggccataacccgagtgtaaaccaacccctaaagtaacaatctctgatagtagccggactcttttttctgcctcctctaagagttgattcccaatccctcgatttctaaatggttcaaaaacattaaaatcagatagttcaggatagactcccacgaaagggccgtgcttggcagcaggcaatatagtgatatagcctgccacaaatccatccgactcagctactaatacgtccctctctctattctcatgctcctgcaaatagctagtcaagatatcctctctacccggccacccttggtggataaaagcttgagatatgtgctcaatatctgcctttatcatcctcctgatgattacaccttccttcatagttccctccttgatacctttctcccctcattatagcataatcagagcttgggaaaggtcaaagagcttcacacggacctaacacactatcacatttctatgctcgcaaaaaaagatccaaagggtctgaaaaagaggtccaccggacctgaaaaaaagacccgtaagggtcttattcgctctcttgttttcaagctcatgaaaaagaggtccactggacctcttttttaatcttcgtttacgaaaggcatcaaagccattacgcgagcgcgtttgatagctgttgttactttacgttggttcttcgctgaagttccagttacacgacgaggaaggattttcccacgttctgaaacgaaacggctaagaagctcagtatctttgtaatcgacatattcgattttgtttgctgcgatgtaatcaacttttttacggcgtttgaatccgccacgacgttgttgagccatgtttaattctcctttatagttttaattcgttaaacccattcttagaatggaagatcgtcgtctgagatgtccattggattggcaccaaatggattttcttcacgaccaaagtttggcgctgcattgcttggttcagatccaccaaagcttgggcctgcatttccagcaaaaccaccattacctgatgaatagccaccagccgcatgcccttcgcgtgctgcacggctttccaatagttggaagctgtctgctacgacttcagtgacataaacacgttgaccttgctggttttcgtaattacgtgtttgaatgcgaccggtaatcccaatcaaagcacctttcttagcccagttggctaagttttctgcttgctgacgccagatcacacagttgatgaaatcggcttcgcgctctccattctgactcttgaagttgcggttgacagctaggctgaaagtagcaactgcttgattgcttggagtgtaacgaagttcagcatcacgggtcatacgaccgacaagtacaacattgttaatcataagtcacctctgatgatttcttacgcgtcaacttttacgatcatgtgacgaagaatgtcaccgttgatttttgaaagacggtcgaactcgttaagagctacagcgtcgttcgcttcaacgtttacgatgtggtaaagtccttcacggaaatcttggatttcgtatgcaagacgacgtttttcccaatcttttgattcaacaacagttgcaccgttgtcagtcaagatagaatcgaaacgtgctaccaaagcatttttagcttcttcttcaatgtttggacgaataatataaagaatttcgtatttagccattgataatgttcctccttttggactaatgaccccaagtctttgcaaggggtaagtgaggtttactcacaagaaactattataccagacttttcgaacaaaggcaaggattatctttaggatttgaaacatcattttttacataccctacgatattaaaggaaaacttcccctttaaaatggaaattatagaaggaaagagactcctttcctgtcccttttccttaaagaaaactgatatcagttagctttaagcttgagtctttatactagctacaacaaatctcaagaaacgaggaacgattatgaattatcttatcatccccgcctatcaaccggatctgaatcttgtcaaactggttcgcctggtccacgctaagagcgatctcaacatcatcgtggtcgacgatgggagtgacgctgacaagaaagtgatttttgacaaattggacggtcttgcgacagttctgactcatgagcacaatcaaggaaaagggcaagcactcaagactgcttatgcctacatcctagaaagaggcacctatagaagcattgttacagctgatgcagacggtcagcacaaaatttgggatattttcagggttgttaaccaatctcaagagcatgctggaacacttattctaggagcacgcgccttctctggaaaagttcctttgcgttctgctttcggaaataaattgactcgcttcttgtttaagcaacaaaccggagtggcggtcaacgatacccaaacaggcttacgagctttcactacgaatctcttgcctttcatgcttgaggttgaaggtcagcgttatgaatatgaaatgaatgtgctcctcgcagcaagcaagtccttcccaatcgtggaagttcccatcgagacggtctatatcaatgacaacgaaggctcccacttccgacctattcgagatggcctcatgatctacaaggacatgttcaaatttgccctctcctctctgagtagttttatcgttgactatctggtctacgccttcttcctcttcgtgatgatggccgtgcccattagtctacgtattctcctagcgaatgggatcgctcgtgtgacgagttccatctttaactactcaaccaataagcacctggtctttaagaataaagacagtgtcgctaaaactggaagtggctactttggtctagctcttggcctctttattctcgatacgctcttgattcgactcttctatactgctttcgggctcaatctcctgatcagtaagattgtcgtcggcttcctcctctttctggtctcatgggtgatccagaaaaaagtgatcttcaaagaaaggactgctacccaccatgaaattctttaaaaaatcctacacctatgctgcctgctttggccttcttttgaccagcagttttagctactctatgctcaagacctttgtcttatccgatgccatccaaaccgtaaaagctacgactacggacaccaaggcagccaaaaaagcagctgcatcggctacaacgactgatactagctattcagatgacaatatccaggtaagcctaacagaaaaaacggttgaaaatacccaggtttacattgcagatatcacagtcagctcatctgactacctcaaaacagcctttgcacaaaatacttacggaaccaacgtgacggctaagacctctgtcacagctgccaacaacagtgccattctagcagtgaatggtgactattacggggctaacagtacaggatacgtcatccgaaatggagtggtctaccgtgataccgttcgggaagattcaagcaatggtgacctagccatttacaaggatggatccttcaaaattatctatgaagatgagatctcagcggatcaattggtcaaagacggggtcgtcaatctcctcgctttcggtccttccttagttgaaaatggagaaattaccgtcgataccaactcagaggtcgggcaatctatggcgtctaatccacggacagcgattggaatcatcgatgaaaatcactacattatcgtcgtgtcagatggacggacttcagaaagtgaagggctaaatctctaccaattagccgaagtgatgaagtcttatggcgttaaaacagcttacaacctggatgggggtggatcttctacactttacttcaatggccaagttattaacaaaccaacaacaaatggtactatctcagaaagggcggtgagtgacattgtctacatcggttactaatcctatcaaaaaacgcttgaaaaagaccatcctatggtacattcttatctcggctttcttctttgtcggaagtcgtatctacgaacactttagttttggcgaaacctctgccttcatgcactacctcttcttgattcctttgatcggtggcgccctaccagtgcttctacagttgatggtaaaaggcttctctcgcctgagcctcaatctttggaattcaggagtggctacgctcacagccggagccctctaccgagggattgttaacctctctggtcgatctactacaatggatcaaccctattattacattggagttgcctttctagcactagctctgattagcctcttctttgtccgcagtgtctgggtggagaaaacagcctaagacatcaaaaacgtccgtttctttatagaacggacgttttttaaggtaagttaacggatgaacgacttagccttcacgtttttttctggctacaaatcctgctaaagctagtgaggtcatgccaaagaggctaaggacggttgaagccaattcatcttgacctgtttttggaagaccagttgctggtgtagcagctacttcggcttgaccacccgtatgataagtgacagcaactggtttgtttgttgccacttcttttgtttcgcttgcagctggttgagctggagttactggagtttcaggttgaggagttggggtaacaggagacactggagctacaggatggactggatttacaggacttaccggatcaactggcgctggctgtggttgtggttctggagtaggtgtttcttcttccactttttccacaaatgtcttgttgcccaagattgaagcagacaacttcttccctgccttattcacatcttcgatgtattggataaagacttccgtatctggattaatggcaccgatcaattttgtatcacggaagactgagaatccatctccgccaccatacaagaagtcgttgataattgccttgtaggtcttgttgcgatcaatttcggttccgtctgccttgtaagctttcacgaccttatatggattttcttctgttgcatcagctggttttgtataggtgtacttgatccctgccatttgcaagaagtagagctctttttcatcatattgttggtccaaagctttgtagatttggtccccagtgatttctactacttggaggatatttccaaatggttgcactgcttgagctgcaccccaagttactgttccgtctggtttcaccacgaggtctgcacggattcctccattattggtgaaggcaaagtcaacatctggataacctgattttttggcaatatctagttgcgctgctgtgaccaaatcgccaacagcactttctttttgtgcattcaattcacgggtaatattttcagccttgtctgctgtaccgatttttgcttctgttacttttttaaccgtcgcattggcttcatcgatgatcgcttgaaccttggcatcttttgctttgcctttcgatggatctaccgcaataattttagcagttggagctttgacaaagtcagctgtatccgtatctaggaccccacgaacatccgagtaggctttcccttgagaggtaccttgaacgatcaaggtatttccgaccattccatttgtatattggtggttgtgacctgcaaagacgatatccactgagttttcaggatagatttggtttaattttttgatcatgtctgcagcaggaccttctgctacaccattcttactagtggcagcaacgtgggccaagacagcgatggcatgaacaccttggtcatttaattcacgggcatatttggcaatcgattctgcttcatccaaaacacggtattgttcatgatttttacgcaagacaagatttgggaattctgtcgtaacaaccccgataaatccgaccttaacggtcttatcgttgactggaatttctttgatagtataaggtttccagtcaaatgggattttgttggtatccttgtcgaccaagttggcaatcacgacttcttgtttagaagcttcatgaggatattcatcgacgatcttattgaattgaccaggtgttggggcttctcccttcatgatccggttgaattcaccaagtccttcgtcaaagtcgtgattaccaagagttccgtattcaaagttcatttcattgaagacttttacagttggttcatcttgaaggagggcagagttggctggactagcgccaaccatatctcccgcttgcacacggatgctggcattaggcgttcctgcattctctgtttcaaagtctttttgcgaatcgttcaaataggttgccaaaagtggggctgttcctgcgtttttcacagtttcaccttctaaacgagctgtccctgtttgttccaaggcaccgtggaagtcattgacgcccataaactgcacgggcaattcgtctgcaaaaacgctattgatcgcaaaaacactaagacccgcagcgaccgctaggatactgcttttcaagataacttttttcttcattaaatactccattttctaatgtcggacacttctccaaagaggagaaaacagaacagttgatttgctgtaatcagctcttccattttactattttttcggtttttcttcaatatttctttgaaaactcttccatctttctctagaaaacgcttgattcccgaacatctcctcccttgtcttttattctttactgaattaaaatcacaaaagagccggattgctccggaaatttagaatgtagacaaactattttaaagtaaaataagtaaaacgattctgcaaagaaataaaaatgaattccattttttaaattgattcaaaaaatgccgaaactttccgctgtgagaaaagcgcctgaaacaataacgtttcaggcactcgaaattattgagaccttaggctcaataattagtcttggaacttcgaagaagttcgctgacgtccgtactcacctaaggaaagtttttaatatgactttgtcttaaatctaaaaagccggattgctccggctctttctattatttattcacgttttcccatttccagttttgaacttctggaatgtcatctccattttcacggatataggcgttgtggaaggctactgtttcatccatttgagctgcaaattcagctgcttctgctccaagagctgcattagcagcatcttgtgccaagtggaagcgatccaactcagacatgacacgcatatcgaatggtgttgtgatatctccgttttcacggtaaccatgcacacgcaagttgtggttgtgacggttgaagaagatgtcacggatcatgccttcgtaaccatggaaggcaaagatcacaggtttgtcagttgtgaagaccttgtcgaactcttcatctgaaagtccacgcgcgtcgactgatgggtgacgcaatttcaaaatatctactacgttgacaaagcggatcttcaattctgggaaggctttgtgaagaatcgttacggctgcaagtgcctctaagtttggctctgtacctgctgctgcaatgactagatctggctcttcatctgctgaaacagttgatgcccaatcgatcaccttgtatccttcacgaaccaattcttcagcttcagctgctgagtagaattgaggacgcgggtgtttagaagaaacgatcaagttgatcacatcttctgccttgaaggcttggtccatcactgcaagcaacgtattggtatctgctggcaagtactcacggatgtattcaggagttttctcagccaagtgagtcaagatacctggatcttggtgagtgtagccattgtggtcttgttggaaaacagttgaagtcgcaatcaagttcaaggctgggtagtttttacgccatgtcgtgtgagtcttagatttacgcaaccatttgaagtgttgagtaatcatagagtctacaacacgaaggaaggattcgtaagatgcgaagaatccatgacgacctgtcaagacatatccttcaagcattccttccgcttggtgttctgacaattgagagtcaatcacacgtccagcagggctcaaagcttcatcgtagtctggtttcatacgtcctaaccattgacggcttgtacgtgtgaaaacttcttgaagacggtttgatttggtttcatctggtccaaagatacggaagttgtctgggttggcatccaccaagtctgccgcatacttaccaaattcgatcatatcttgcgccatgatagcacctggtgtttcgatcttgaaggcatgtttcttccaatcagcagtgttcattggtttgatcacaccagcatttgtgattgggttcatagccatgcgacggtcaccttttggtgcgatttcagcaatttcaggaagtaatttaccagtttcgtcgaacaactcagctggacggtatgattccaaccaagaaagaagagcatccacatgctccatgtggtgagcatctactgggattggcacttggtgagcacggaagccaccttcaattggtgttccttcccaagcttttggtccagtccaacctttaggaatacgagcaatcaagacagggtatactggttgagttgcttcttctgcagaacctttacgagcttctgcttggactttcttgatttcttcaatcgcttcgtccaatttctctgcaaacaaagcgtgagcagcttcgtggtcatcagaaatagcggttacatttgcaaagattggtttccaaccaagaccttcaaagaagagggccaattcttcgtctgttttgcgttcgaagatcgttgggttgtggatctttcctccgttgaggtagaagattggaagaacagcaccatcgttgactgggttcaagaaggtatttgacaaccatcctgccatcaatggacctgtttctccttcaccgtcaccgatcactgttgcagcaatcacatctggattatccaatacagcacctgcagcgtgagaaagggcataaccaagttctcccccttcatggatagatcctggtgtttcaggcgccgcgtgagaagcaatccctcctgggaatgagaagatcttacacaagtgtttgaaaccttcttcgttttgagggatagttggattcaattcagtatatgaaccatctaagtaagagttagataccattacttgtccaccgtgacctggtccttcaatgtagaacatatccaagtcgtatttgttgatggtacggttcaagtgagcatagataaagttttgccctggtacagttccccagtgcccgattgggtgagccttcaagtcattttcaacgacttcacgcttcaacaatgggttatcttttaagtacatttgagcagctgaaatgtagttggctgcacgccaccaagcgtctactttatccaagtaagctttgctgttataatcgacagtcatcttgtctcctcacaatttctagacaggtctgttgaacaacctgttcgtttgatgaataatttaaacattctgttttcaagatcaaacagatgatattgaagaaaatattcaatattacttctattctatcaagaatttttatttttgtacatcagaaagtaagaaaaatattctttgatggtcaaatttttattctccgataaagcgttcccatttactgtggagatctgatagaaaaaagactttgctgatttttataaaccagcaaagtctcgactgaaatggagtagtttaaatgactttttgacctttcttgtagacatctgtcactagatttgtcgcaaagaaatagaagagatagtctagatttggcgcatcaaagatggtaatgtcagcctgcttgccagcatcgaaagaaccgatcgttttggcacgatctactgagtaggctgcattgatagtcactgcattgagaatttctactggagttaggcgcatcatgaagcaaccaaggtgcatggcaaactgaagattggctgtcggacaagaccctgggttgctgtctgttgttagggtaatagccatgccagcgtccaacatcttacgagccggtgcataagtatcttccatgaggctaaaggttgtggccggcaacagattgccgataacttttgccttggctagtttttcgatcccctcatcggtaatgaccatcaggtgttctgcgctggtggattgcaattcagccgctacgtcaacacctccaatagactcaatttcatccgcatggatccgtaacttgaagcccatttccttagctttcgaaagaagatagcgagattcatctgctgtaaagacccctttttcacagaagatatcacagaactcagctaactgtccttctttcacttttggaagcatttgttccacaatgagatctaaatattcttgagaacggcctttgtactctgtaggaatcgcatgggctgccataaaggtagataccaagtctatttgatgatcccgatccagtgcagcgacaacatccaactgtcgtttttcagtttcccaatccaaaccgtaaccgcttttcgcttcaacagttgtcaccccatggcgcaacatgtagtccaacagtcgtttggacttgtcatagagggtgtcaaaagaagcttcccgtgtcgcccgaacggtgcttagaatccctccgccttgggcgaggatgtctaagtaagaaacacctgctaattttttagcaaattcatgctcccgactgcctccatagactaagtgggtgtggcaatcaatcaggccaggggtcgcaacttttccttcacaggatttcacttccgtatggtcatcgatcagttctggggctggttgccctgtcccaactgcaagaatctttccatctttaatggcgatataagcatctgaaagaatttttgcctctgccatctccttaccatagagaggatgacccagatcatttggacaaaacaattggttaaagtgggttaataggatatcagctgacatatgaaacattcctttctatttccatcgttattcattttacaattctacagaaaaagcgtcaaaaaaaagtcaaaaagttttcccctcatttttttttgctttattaaaaattatatttttttttgactctttattgacgtttcttggatacaataaagaaaatacaaattcacagtccaactataaggagggttctgctatgtcatttatagacgagaaagaaattgcagctgctatgtctgtcaaacttgactttgatgtcctacctgaaaaggcgacttttcaagaaggcattcgtcgtgcaccggatagaggcttccgcttaacgcaggctcagaccgaaattgcccttaaaaatgctttgcgttacattcctaaaaaattccaccaagagttgatcccagaattcctagaagaactgaaaactcgcggtcggatctatggctatcgcttccgtccaaaagatcgcatctatggaaaaccaattgatgagtacaaaggaaaatgcactgctgctaaagctatgcaggtcatgatcgacaacaacttgagctttgagattgccctttatccttatgaattggttacttatggagaaacaggatctgtctgtgccaactggatgcaatacaacttgatcaagaaatacttggaagtgatgacagaagaccaaaccttggtcgttgaatctggtcaccctcttggtctctttaaatcgaaaccagaagctcctcgcgtcgtcattactaacggtctcttgattggtgagtatgacaatatgcacgactgggaaatcgctgaagaaatgggcgttaccaactacggtcaaatgacggctggtggctggatgtacatcggacctcaagggatcgttcacggtacctttaacacccttcttaatgctggacgtcttaaactcggtgtgcctgatgatggcgacttaactggtaaactctttatttcatctggtctcggtgggatgagcggcgctcaagggaaagcagctgaaattgcaaaagcggttgccattgtcgctgaagtcgaccgctctcggatcgaaacgcgccactctcaaggttggattagccaagtgaccgacagtgcggaagaagctgtgaaattagctcaagcagcactggaagctggtgaatcaacttcgattgcctaccatggtaatatcgtagacttgctcgaatatgtcaatgaacaccaagtgcacgttcatctcttgtctgaccaaacctcttgccacaacgtctatgatggtggctattgcccagttggtatcagctttgaagaacggacacgtttgttggcagaagacaaagaaaccttccatcgtttggtcgatgaaaccttggctcgtcacttcgcagtcatcaaagacttaacggctaaaggtacttacttcttcgactacggtaatgccttcatgaaatctgtttacgactcaggcatcaaggaaatttctaagaatggtttggatgacaaagacggcttcatttggccatcttatgtagaagatatcatgggacctatgctctttgactatggttacggtccattccgttgggtctgcctcagcggtaaacatgaagacttgattgcaactgaccatgcagcgatggaagcgattgatccaactcgtcgctaccaagaccgtgataactacaactggattcgcgatgctgaaaagaaccaattagtagttggtactcaagctcgtatcctctatcaagattgtatgggccgtgtcaacattgctttgaaatttaacgaactcattcgccaaggcaagatcggacctgtcatgattggacgtgaccaccacgacgtatctggtacagatgctccattccgtgaaacatccaacatcaaagatggatcaaacgttacttgcgatatggcagttcaatgttacgctggtaacgctgctcgcggtatgagccttgttgctctccacaatggtggtggtactggtatcggtaaagccatcaacggaggatttggtctcgttctagacggtagccaccggatcgatgaaattatcaagtctgctatttcatgggataccatgggaggggttgctcgtcggaactgggcacggaacgatcatgctattgaaacagcgatcgaatacaaccgtctccatgcaggtacagaccacatcaccattccttatcttgcagatgaagatttggtcaaagatgcggttcaaaaattgttttaattataaaaaataaaaatggagaaagggaggaaaattcaaagactcctcctcccccaacttctcctataaaaagaggtaatcatatggcaaaaattgttgagtgtattccaaacttttctgaaggacgcaatcaggctgtgatcgacggattggtagccacagcaaaaagcatcccaggtgttacattattagactattcgtctgatgctagccacaaccgcagcgtctttacactcgttggggatgaagaaagcattcaagaagtagctttccaattggtgaaatatgcatctgaaaatatcgatatgaccaagcacgaaggcgaacaccctcggatgggggcaacagacgtttgtccattcgttccggtcaaagatatcactacagctgaatgcgttgaaatcgctaataaagtggccgaacgcatcaatcgcgaattaggtattccaatcttcctttacgaagatgccgcaactcgtccagaacggaaaaacttggctaaagtgcgcaaaggacaatttgaaggaatgccagaaaaattgttggaagaagactggaagccagactacggtgaacgcaagattcacccaactgcaggggttacagccgttggtgtccgtatgccactcgttgctttcaatattaaccttgacacagacgacctagatattgccaataaaatttctaaaatcattcgtggatcaagcggtggatacaaatactgtaaagcgatcggtgtcatgctagaagatcgtaacatcgcccaagtctctatcaacatggtcaacttggaacaattcccattgtatcgtgtcgttgaaaccgttcgtttcgaagcacaacgctacggggttcgaatcatcggaacagaactcatcggacttgctcctgctaaggctttgatcgactcagctgaatactacttgcaattagaagactttgactacagcaaacaagtcttggaaaatcacttgttgggttagaaaggggatctatgaaactagttgacttaagtattacagagtttgccaaggtccttggttcagatgctccagctccaggtggtggttctgctgctgccctatccgctgcgaatgggatttcccttacaaaaatggtctgtgaactgaccattggtaagaaaaaatacgctgaatttgaagaccacatcaaaggggttcacgaaaaaagtgcccacctccaagacaaattactagaagccattgacaaagatacagaagctttcaacgtcgtatcagctgtctttgatcttccaaaagaaacggaagaagagaaagccgctcgtcgtgaagccatgcaaaaagctttgaaacatgcgacagtatctcctttctctatgatggagctcatcgttgaggcgcttgaaaccaccaaagaagctgttggcaagtccaacaccaatgcggcgagtgacttaggggtggctgctctgaatctcaaagctggccttcaaggggcttggcttaacgtcctgatcaacatttcaggaatcaaggaccaagactttgtccaagaataccacggcaagggtctcgaactcctccaaacaggctctgatcttgcagacaacatttaccaaagcattttagaaagtctatcataaacctaacaaacaaaaagaaagaagggattctatggttttatcggatattgaaattgccaattctgtccaaatgaagcccattaccgatatcgctgctgaacttggattgaccgaagacgacatttcgctctacggaaaatacaaggcaaaaattgatagcaaccaactggaaaaactcaaggataaagaagatggaaagctgatcctcgtgacagccatctcaccaacacctgctggagaaggaaagacaaccacctctgttggcttggtcgatgctctttcagctattggtgaaaaagccgtcattgccctgcgcgaaccttctcttggccctgtttttgggatcaagggtggagctgccggtggcgggtacgcccaagtggttccaatggaagatatcaaccttcactttaccggagacttccatgccattgggattgccaacaacctccttgcagccttgattgacaaccatatccatcacagcaatgagttgggcatcgattctcgtcgcattacctggaaacgggtggtcgatatgaacgaccgtcaactccgtcatattgtcgatggccttcaaggaaaaacaaacggggttcctcgtgaagatggctttgacatcacagtggcttctgaaatcatggccattctctgtctctcagaaaatatccttgatctcaaagaacgtcttgatcgcatcattattgggtacaactaccaaggacaaccggtcacagccaaagatctcaaggctggaggggccatggcagctgtcctcaaagatgccatccatccaaacttggtgcaaaccttggagcatactcctgccatcatccacggcggaccatttgccaatatcgcccatggctgtaacagtgtgctagctactaaactagccctcaaatatgcagactatgtcgtgacagaagctggttttggagcagacttaggcgctgaaaaattcatcgacattaagtgccgcatggccggactcaaacctgctgccgttgtcctcgtcgcaaccattcgtgctctcaagatgcatggtggagttgccaaagcggacctggctactgaaaatgtccaagccgtgatcgatggtctgccaaacctggacaaacacttggccaacatccaagaagtctatggtctacctgtggtcgttgccatcaacaaattcccgctggatacagaagcagagctagaagctgtctatgaatcttgtaagaaacgcaatgtagatgtggtcatttcagatgtctgggcaaaaggtggagctggtggtcgtgacttggctgaaaaagtcattcaactggctcaagaagaaaaccacttctcttatgtctatgacgaagaagacagcattgaaacaaaattgaccaagatcgtcacaaaagtctatggtggtaaaggcatcagcttaacaccagcggccaaacgcgaactgaaagaattagaagctcttggcttctcgaactacccaatctgtatggccaaaacccaatattccttctcagacgatgcgaagaaaatgggagcaccaaaagatttcacagttaaaatcagtaaccttaaggtggctgccggagctggcttcatcgtagctctaactggtaccattatgaccatgcctggcctacctaaagttcctgccagtgaaaagattgatatcgatgcccacggcaatatcactggtctcttttaagaaagaaggcgtcctatggtgactctccttcatcttacccccgcagattatcaaatttctacctggtccggtggccaaaccacccaactctttctctccccagagggaggaagctatccagatcggacctttgacttccgcctctctactgcaacggtagaggttgaaaaaagtaactttaccgatctcacgggctaccaccgaatcttgatgcccttgaatgcctccattaggctcacccatcaccataaagaagtggttttgaacccctttcaaagctacttctttgatgggggagatcctgtatctagccaagggacttgtcaagactttaatttgatttacaaaccttcttatcaggggcatatgagtgctatatccccaaaagagagtgtcaaaagtcagagtcgctatcaattgatctacgctctctgtccactaacactcgaatggggaaacaatcattctcaaactctccaaactcacgagctcctggtgatcgaacaagcatctcctcttcaagagatgacaatcacgtttttaccccatcagtctggggagcaaccgattgctatctggactggactacaataatgttcacaaaggagaaacattatgaacggagcacataaacagtcgattgaggaacaagaaaaagcgaaattcagctttagcggtgccactctttacggtatcaacgccgtaatcggatctggtatcttcctcctccctcaaaaaatttattctggcctcggaccagcttctctagctgtcatgttcggggttgccattctcgtcatgctactatcagcctgtctggctgaaacagctggctacttcgacaaaaacggtggagccatgcaatactcaaaagccgctttcggagacttcgttggctttaacgttgggattctcggttgggccgttactgttatcgcctgggctgccatgttagccggctttgctaagatcttcattattaccttcccagcatttgaaggctacaaccttccgatcagtatcggtatgctgattctcttgagtctgatgaacatcgccggtctgaaaacctctaagatgttcactctgacagctactgttgcaaaattaattccaattgtcctcttctcgctctttgccatcttcttcattcctggcggggtaagcaagggcaacttcacacctttccttcaattggaaagtggaacaaatctcttcagtgctatttctagtacagccgtctacatcttctacggtttcatcggatttgaaaccatgtctatcgttgcaggggaaatgcgtaaccctgaaaagaacgttccccgcgctattctaggttctatcagtattgtatctgttctctacatgttgatcatcgctggaacaatcgccatgcttggtggtcgcattatgcaaactggtgcaccggtacaagatgcatttgtcgaaatgattggccctatcggagctcccctcgtttcttacggagccctcatttcaattgccggtctaaacattggtgaatccatcatggtccctcgttttggtgccgcattagcaactgaaaaactcttgccagagggtcttggaaaaacaaactctaagaacgctcctgtcattgccattatcatttctgctatcttcgctttcttactcttgttatctggctctttcgaatcattagcaaccttcagtgttgtcttccgtttcttccaatacattccaacagctttggcagccatcaaactcagaaaaatgtacccagacaaaaaggttaccttccgagtaccatttggtcccgttatcccagttctagccgttgtgatcagtatcttgatgattgcaggggacaacctaatgaactttgtttggggggccatcggtctcgtgattgcaagtggactttactttgttttccacggcgataaactacataaatcgaaaacccttcctcactaattttctttacacactagatgggaacagagacgggagcgaagctcggttttgctccctaacccatctaggactccacgaatgtcaaacctgagcccttttctctatgactcttttcaatttttatgatcaatagacaatgggaccatgtttggtattcaaaccgaagtaaacaacactacttccacagaacaactattcataatcggaggttttatatgactcaattgattcatttagatggtaatagcttaacactcgaagaagtcatcgctgtagctcggcacggtgcccaatgtgagcttgatgaacaagccaaagaagccgttatcgcatcccgtaaaatcgttgatgacattgtccgggaaaaacgtgtcgtctatggtgtaaccactggctttggttccctctgtaatgtcagcatctctccagaagatactgttcaactgcaagaaaacctgattcgaactcactcatctggcttcggtgatccacttcctgaagatgccgttcgtgccatcatgctgatccgtatcaactcactattgaaaggttattctggcattcgtctgtcaactgttgaaaaactgttagaattgctcaacaaaggagtcactccttatatccctgaaaaaggctctctcggagcttctggagacttagcaccacttgctcatatggttttaccaatgttgggtcttggacgcgcctactacaaaggagaacttctcagtggtcaagaagccttagatcgtgctggaattgaaaagatccaattagctgccaaagaagggcttgccttgatcaatggtacgactgtcctaaccggtatcggtgctcttgcgacttatgatggtatccaattgctcaaactctctgatatcgctggtgctctctcaatggaagttcacaatggaattaccagtccattcgaagaagaccttcattccatccgtccgcaaagtggacaattggcaactgctcgcaacatccgtaaccttcttgaaggaagcaagaataccactgttgcgactcaacaacgggtacaagatccttatacacttcgctgtatccctcaaatacatggagccagcaaggattctattgcttacgtaaaagaaaaagttgaaatcgaaatcaactctgtcacagataacccaatcattaccaaagaaggacacgtcatctcaggaggtaacttccacggtgaaccaatggcgcaaccatttgacttcttaggcattgccctttctgaaattgggaacgtatctgaacgtcgggtggaacgcttggtcaacagccaactcagtaaattaccatccttcttggtcaaacaccctggactcaactcaggcttcatgattacccagtatgcttgtgcatcccttgcatcggaaaataaaattttggctcaccctgctagtgtcgattctattccatcttgtgaaaaccaagaagatttcgtcagcatgggaacgactgccgctcgtaaagcagcagaaattcttaaaaactcacgtcgcatcgttgctactgaaatcatggcagcttgccaagccttggatctcaagccagaaaatcatgaacttggtaaaggtacaaaaccagcttatgagctgattcgtcaaaaactgaacttcattgaattcgacaaagatatcgaaatctttgaagaacttaataaagcatctgctgttgtcgaaagcgaagaattcttagcaaccatcgaaaaagcagttgacttaagcattcaatactgatacagtaagaataaagcaaaacagaggctggcgatcttctcagcctctgcctgctttcagaaaaataagggaggcgacaagcttgctcacaaactactatccaatgacctacagctactaccaaggtagcatcgaggacaatccctacacggccaaatggggaatggtcaccaaatttttagacctaaacgacgagaccctcactccatttgagggtatgacctttgggatcatcggctttaagagcgacaaaggagtctatatcaataatgggcgtgtaggagcagtcgagggtcctacagccatccgttctcaaatcgctaaacttccatggcactggggaaccaatgtgacagtgtatgatgtgggaaatattgacgggcctaaccattcactagaagaactccaagaaagtctctcacaagcgatccagcgcatgtaccaattagggatccaacccattgtcctaggaggcggtcacggaactgcttacggccactatctagggattcaatccagtttagaaaaagatgaacaactggctgtgatcaatctggatgcccactttgatttgcgaccttacgaccaaaccggtcccaattctggaacaggttttcgtcaaatggctgatcatgctaaagaaaaaggtcaggacttcccttacctcatcctggggatccaagagcacaataataacctcttcctctttaattacgttgctaaaacaccaagcattgattttttaactgggcaagatctcttccagatgagccaccaagccattctggatcgaatcgatcaatttttagaaaaccaaaccgcgatctatctgtctattgatatggattgctttgcggtcggctctgctcctggtgttagcgccatccaatcacttggtgtcgatcctaaactagccctcctgcttctccaacacattgctgctagtggtaagctaatcggatttgatgtcgtggaagtttctcctcctcatgacattgacaatcatacttcaaatctagctgcgacctttatcttttacttgacccaaatattggcgcaacaaaaactgaactaagaagatttctacacacgtaaaaagcatagaaacactcattgcttgggtatttctatgctttttcttcattttcagacacaatgatctttgcctgaaaggaggcatggcctcttatccttcacttatgatttagataagagacactacaggtcttttaatttcttaagaaactgacgatctctgtaaggattcaagtgttgttctgccaccttcttgtagtaattcttatcttctttcaagaaggtgctcagggcaggagcgagctcttctcccttctccttttgattagataagaaagccaatagataatgaaccatccccttatcccgcgaattggcagatggattcatcgtcctttcttttcgagccagataatccgcaaccttctcctgatccccttgctgacaagcaatcaaggattggtaaaattcgagcaattcttccttccaagggaaacgaacactggataaaatcttctgagctctgtcaaaacagcggcgagcttgaatcaaatctcccttccaataataggcgatcccaagatcaatatcaaagacgacacggacggaatcaacagcttgatctcccaccaaacgcagaacctcttctaagtgggtgaccgctacttggaaatgccctctcacttgctcgatttcagcgaggtaggccaaagaagctgcaatttgaatggcatacttggcctgcatgctattggtcaaactaaagcaatcaatggagcgatacagatgccgggtcgcctgctcctcatccccaaccatcaggtgatacaagcccttcaaacgcaactggatcgcgatgacctcatgattattagcttggatggcatcttccaaagccaaatctgtataataagccatctcagagatattttccgtttgaatgcaataataaatgatttgccgataaccctctaagaggaagtcggattgcttgagttcccgcgcataggagatgactttttggatatcatgaatccccttttgatactccccacttcgaataaaatagcgaccttctaggtacaagtaacgcagttgtaaatgcttgtattctctatctctttggtgccttgaaaagaggttatctaattcttggcgaatgcgggatagctctccaaaaatgtccaaatggctatttgtaccatctgataggaacccctcatctaccttggaataaatcggaaacagctcatgctccagctgaaggatttcttctaaataggtcaactcaaaagatatggaacgcaaaagattttgggattgtttgtattggtaggcaatttccttataaagaagaaggtccgtcgaatcttctaaagtttcttccaatttttgcgcaatttgttggtggaagagccgcagtctagctggcgaaagaagatggtaaaagtacatggctaccaattgcttgcagaattgaaccatgagagcctctccttcttctacgattgagacgatcgctctttcagataaaggctcgattaattctgtcaaaacaggaagctctgtagccgtcaattctgctaagatagacagagaaattggcttatgaaaacaagataggtagtgtagaagagcctcttcctcactactcatatccccaagctcctgagaaagataggcttgaatgatatcaggcaagggttctaaattttcattttctttccactcttcgatatagctggacagaaagaacggactgccttcactccattcgaccatctgctccatcactgcaggctctattgctcccagttcccctttcaagagagcacgactttcacttggttcaaaattggtcaactctagttgagacaagcgtttctctaccttcaagccccccaagaagttgacaaagaaatctggtaggggctcttccgctgtaaaaattagttgccatttctcctgatttcttcgctcttctagttgtttcactttttctagagacactgcatcgatccactgggcattttcaagaagaatcaggagcggtttttctttgctaaggccttgaagctgattccacactgaaatgagatcatcctccccttccagaaatggaatccccatctcatctcccagtttctctagagcttgtttgagatcattccaaatacttccttcgtagcgttgactagtagcttttccttcaaccttgataaagttaaaactgcgattggacatcaagaccaactgtcgtaacagacgtttcttacctgttccagattgccctatcacgagaaaaggacctactgcttcacccgtctcgactaaggaaaggtattcctcgagttgtgagagttcttgtttccggccaaaaaaggaaagttcacggatattcaagcgattcgtcagtttatgagttcgtttggcttccaaaacggagtgataaagttcctcaatcgctcgactgggacgcacactgagctcgcgatccaataaatcgacaagtttataataggtctcgaaaaattttcctagttggtgatggaaactataatactccatcaagagctggtagtttttctcttcaaattcatccagctctaccaaatgatggagcaagagttctatactaggatctccgaaaccaacctttttaattttttgatagcagctttcgatgtagagcttcctaaaagcatcccgtttgcgagaagcccactgatcaaagtcttcatcatccttgacatagaagccctctaaaaagtctccccgataaagatccaaggcacttagtggatctctttcaaagagctggacatccaaagaaaaactcaaatgaggattaagagccaaactgctccggcttggagagacaatgatatctccctcaaagattttattggcttggtaaaccgtattccgtaagtttttgcgggctacttggttttccttatctccccaaagaataccggcgatttcatcacggttgacctggcccataactgctaagtaataaaataaggcctccatcttcgaaaaagaaaaacgaatatctttctgattaaaaacaaccttagggggtccaaataatttcagcttgagttcttttttcattgcaagcgcctccaaaaacttcatattaatactataaaaaaaaagttggtttttagcaagtgattgacccgaataaaaagagactgagaactattctttctcaatctctacacttcctactaaaagtgttgattaattcacttcaaaattcggttgatgagcaaataaagcctttgttgcttggtagacgtggtaagcgacatcttcattgttcatggtgtaaagatggacccctgccacatcttgagtaaccaaatcaacgatttgatcgactgcataagctaagccagctgcgcgaagagattctggatcatgctcatacttgtctagaatggctttaaacttccgcgggatatgaacattttcacaagttttgaggagacgaagggcctggtttctgttaagaatcggcatcactcctgcatgaataggaacattgatcccagctaaagtacacttatcttgaaagtcatagaaacgctcattgtcaaagaaaagttgagtcactaggctcgaacatccagcatccactttctttttcagattttgaatatctgaaatttgatttggagaatctgggtgaccttctgggtaacaagcaccaatcacatcaaagtgaggagcttctgttttaataaattcaatcaagtccgttgcataacaaaagtcttttaaaggttccacaccaggaataatatctccacgaagggccaagatccggtgaactcctacttgatctaactcatgaagggtatctgctaccttttccttactgagatagatagccggtaagtgggcaatggtcggaatagacaattcattctgaatatgattggctaaagcaaccgtcgtctctttgatattgtatttgttattgctagcggtcacactgataaagtgaggggctagctcctgcatatttgccaaagcacgtaagagtttggcattgcctacttcaggatttggaggaaaaacttcaaatgacagagacggtgtgtgttgtgacatattctatccttttcttttgtttcgttgatcaagaactctgagccactgtttctaggataagggatgattcgaaaaccctctacacgatgatagaaggtcctcgaaacattttcttacaagtgttcacgcgcttctttagcagcattaactagtttgatcaagctttcttttgtttctttaattccgcgagtcttcaaaccacagtcagggttgatccaaactttgccacttggtactttcgccaagatcgcttcgatagtgtgatcaatttcaccgtcttgtgggacacgtggtgagtgaatatcgtataccccaggtccaacttctgtttggaagtttttggctttcaactcatccaagatttcaaggtttgaacggctagcttcaaatgagataacgtccgcatccaagttgtcgatagctgggatgatatctgtaaattctgagtaacacatgtgcgtgtggatttgtgtatctggcgctacagttgagtgtaccaagcggaaggctggaatcgcccaatcaagatagtcttcataccagtcgctgcgacggagtggcaatttttcacgaagagcagcctcgtcgatttggatgattttcacgcctgcagcttcaaggtcaagaacttcatccttaatggcaagagcgatttgaagagtagaatccttgatagagatatcttcacgtgggaatgaccagttaaggatggtaacaggtccagtcaacatccctttaacaggtttatccgtacgactttgtgcgtagctagaccatttcacagtgattgggttgagacgagtgacatcaccccagatgattggtggtttcaccccacgcataccgtatgattgtacccaaccgtttttagagaagaggtaacctgacaagttttgaccgaagtactcaaccatgtcgttccgttcaaattcaccgtgtaccagcacatcaaatccaacttcttcttgccatttgatccattcatcaattgtttcagcaaggaaggcatcgtattcttcttgagtcaattcacccttacggaaggccaaacgtttagcacgaacttctttcgtttgagggaatgaaccaatggtagttgttggaagagctggaagtttgaaggattctttttggatttcttcgcgttctgcgaaagctggcaaacgagtgtagtctgcttctgtcaacgctgcgatacgagcatgaagttcagcatttgctccgacacgttcggttgcgaagagttctttgttggcagcaagagcttctgcaccttgaccattgcggatggcatccaagtcacgcaattcacccaatttttcaaccgcaaaggcgaagtggtccaaaatagctggttcaaattcttcattagcagttgtaaatggcacatgaagaagggagcaagaagtagtcaagacaaccttttcagctggaacttgatccaagatttctaagctcttttcatagttgttgcgccagatgtttttcccattcacaataccagcataaagggtcttatcagctgggaagccacctttcaccaattcaagtgttttctttccttcaacaaagtcaagaccaataccatctactggcaagtttacaaggtcattgtagacatcacgaacatcaccaaagtaggtttgaatcaagacctcaaggcctttcttgtccgccaagagtttgttgtagaggttcaagaagagggctttttcttcagctgacaaatctttgacaagagctggctcatcgagttggatacgagtcgcaccaagctctgccaattttgcaaagacttcttggtaagcagcagccaggctgtcgacgaagtcttctgctttcactccatcttcaaagtcagataattgaaggaatgtgaagggtccaacgactactggacgagtgttaaggcccaagtctttagcttcttggtactcatcaaaaatcttgtgaccagccaatttcacttctgttgttttttcaaatttaggaacaatgtaatggtagttcgtattgaaccattttttcatcggaagggcacgcacatcccctttttcaccttggtaaccacgcgccaaagcaaagtattgttcaaggtctgtcaaatccaagttttgaacagatgcaggcacgacgttgaaaagaaaggctgcatcaaggaaattgtcgtaatgtgagaagtcatttgaaggaatctctgagatgccttgctctttgacaatgttccagtgtttagcacgcaagtctttggcagctgccaagagctcgtctgctgagatttcttttctaaagtatttttcagttgtaaattttaattcacggaattcacccaaacgtgggaaaccgataattgtagttgacatgttgtgtcctccaaaaattctaattgacactatcatatcagaagatagccgtcttgtataattgcttttacacgaattttgatataggcaaaaactataacacagatttaataggccttgggaccagagatcaaaagcaaaaactaggactacttataaatatttcctatagcccctgcatcaccgaaccatttttgagcggattctgctagaagaacaacccctaaaaagcaaaacaggccttctctattgagaaagacctgcttttataaggaagttcgttccttaatttttttcatttgcttcattaggctaatttgacacagaaggcatcccaaggggctaacttgcccgattcgaggacctgctccaccttggtattggcaatgagaacctcttcaactccattgacaagtggtaagtcttgctcttgacttgagagattgacaacgacgaggtaggcttgcactccttctacccgcttgtaagcaaaaaccttgtctactgcgtccaccaattcataatcagccgtcacaagccaaggatgctcttttctcaaggccaccagagtttgataggtatagaaaatggagtctggatctgctagagcagcctcaacattgatctctttgtggtttgggttgaccgcaagccatggttgacctgtcgtaaagccagcttctgcctcatcattccactgcatcggtgtccgtgcattgtcccgaccaatatggcggatctgatccatgatcacttcgagtggcactcctttttctaaggcttcatgggcatagttgattgactcgatatcttctacatcctcgagggtctgaaatggataattggtcatcccgatttcttctccttgatagatatacggagtccccttcatcaagtgaagcagaattgctaaagccttggcagatttgacacggtagtcgccatcatccccccaagttgacacaatccgtgggagatcgtggttgttccaaaagagggaattccagccttcgtcttttcctaattccgtctgccacttggtgaacatttctttcaattttggcacatccaattccttagcgtagtgccattttggttgacccggttggtattgaagaccaatgtgttcaaattggaagaccatggacaattcttgattttttggattggaatattgcttagcaatctctggagtcgctccccaagtttctcccacggtgagcagatccttatcgccaaaggtagcttgattcatttccttcaaataaggatggagcatgggaccattgctgatgatttcctgatctgggatcttaccgatcatatcgatgacatccatacggaagccaccaatccccttgtcaatccagaaattcatcatgtcatagatctgatgacgaagctcctcgttttcccagttgaggtctggttgcttcttactgaagttatgcaggtagtattggcctgatgcttcatccaattcccaagcagagccactaaaagcagaaataataccattgggctcatcgcgccaaatatagaaatcccgctttggactatctggattttcacgtgcttcgataaaccaagcatgctcatcagaggtatggttgaccaccaagtccatgatgattttgatcttgcgtttatggccttctgcgatcaattcttccatatcttccatagtcccaaagatggaggcaatatcctcgtaatccgagatgtcatagccgttatcatccatgggactcttgtagactggtgagagccagatcgctgtaatccctaatttttccaagtagtctagcttgctcgtgatccccttgagatccccgatgccatcgccattactatccttgaaactctttggataaacttggtaaattacggcattatgccaccatttttgttccatttttttcttctcctttatgattgtgaaatcactttcatcatacaaaaatagggatgaaattgcaagaatttacaagtcttcattctcttcactggaataaatcacttcaaagagacgttgacgcaaaccttcctctaaaggcgtaatgaccttcatcaactgtttccaattcttggctgttgaacaagccgcaaataattcattctttctatcgtaggccaggttggcagatttcaagagctcaaacatccgatcttcttttgcagtaggacgcgattgcagctcacccatcgcaatctcctgactgtgattgtccactaagataggggctgtctcaaaggtatggaggaagaaccggtgctgtctcttttcaggaagcagcgttcgatcacctgttaaatccaacctaatctttctttcatcccaattgacagttaggcgggtttcaaccctgttatctccttctccttcaaggagcacgaaggaacgattgtcacctgggaaaagatgccagtccagcatttctgggagctctacccctgtctgcgggtgtgcatccatagggatgacggctcctgcacgcgcaaagaccggaatatcctggctagctctaaagactgtaagcttgccttttccttcgtacttccaatcatggaagaaatcataccaaactccgtctgggaaccaaacactcacagaagcactatgatagacaggatccagagcctctgaaattggggccaccatgagttcactaccaaagaaatattgatttttaccctcataagcatcttcttcgtttggatagtggtaatagaggggctgaaccaaaggcagtccttgttcatgcgtcgccacattcatggtgtaaagataaggtagtaagctgtgacgcaggcgtaaatatcgcttcatccagcgacaggtctcagacgagtaaaaccacggttccttgctgttaaaagcattacaagaactatggagacgattgatcgggctaaagaccccaaattgcaaccagcgaagagccaagtcttcatcatagtaaccccgcatatggccaccaatatcgtgactccaccacgtataaccgatatttgaagctgtgctggtaaaatagggttgaaaggctagggattcccaagtcacaatggtatcccctgaaaaaccgatcggataccggtggctgccaggacccccataacgcgataaaataagaccagcttgacctgtacgacaattgtctagataatgataatgatttaacaaccaaaggggatccatcttgccatgacttccctgttgccaatcaatccaccaaaagtcgactccttgatcttccaagggatgatggacatcttcgaaataagcttcgcgaaaggctggactgtaaaagtcaaagctagccgcttcttctttttccgcatctaatcccaagcgttttgcgaccatggggtaagcatcctcgaaggcacgaatgccatctgctggatggacatttaaggtcacctttaaaccacgctcatgaagaccatgtaagaaggcagctggatcaggaatcaagtcccggttccaactatagcccgtccaaccacttccaaagcgagcaggaatcgctgtcttgtgccagtccatatcgatcacactgacagccaaaggcaccccttcagccttgaaacgatccattaaatctgtgtactcctgactggtataaggccaataccgactccaccagtttcccagagcataacgtggcaagagagggggttgtcccgtcagatggtaaaaatctttcaaggcccctagataatcgcgcccataaccgaagaaatacagatccacttctggacatggccgtgctctaaatccgctttcgacatcatacaagtaggagctggaatcgtctaaaagagcataaccggccttgctcaagatcccatcttccaactccatagctccatcgacctcgtcaagcgtccgactggtccctttcaaggtctcaggctgatcaccatagtgccaccggctaccatagactgcatactgacccttgagctcgataaaaagccgatccggtgtaaaaggtcccttttcaaaatgaaggtggagatgctccgtatgcagatcgaggacctcttctgtctctacgacctcacaggcaacaggtccaaaatcacgattttgcacaacttgcgtctgaccatcttcaaaaacaccaccctctgaatattccaagcgcaccaaagattccgttaatacggagattcggtagttctctccctgtatcactgatcctgccatttgtctttcctcctctttttatggagcatctgactgcccgctttttatctgcttcacctcaccgtgtaagcgtttacgattttactatagcactcaaaaaaaggcctgtcaacacctgacagaacctttcctaaaatattataagatcaacttccccaatggatcaagagatacatgagactcgatccaaacatatctgccaagacatgcacgaggaaaaatggcaagagattcttgacgaccttgaggacggacgttaggtgaaattatccagtggatgatttcagcaattcaggaagttccatgactaaattaagatacagagggcatctgcggagtaaaaattaaaaatcatatttctgcagaatcatttcacctattttagttaaaaaataggttatcaacattctgaggctgggacaaaagtcctagcctcttaattgtttttgtactgttgagcaagacgcagtggttgagtgggctctactacgctgatttcatcagcttttacagccctactcaactatgcggaggtgggacgacgaaatcgaattctaacgaattcccgatttctgtcccactctctctcagtttgtttcctctaagaggtcttggattctatccagatactggttgtctgtcaccgccatcacgcgcaccccttctggccagataaagtcgggaccaatctgacttcgcaaaggctggtcctccgcatctcgatagccaataatattgagttgaaattggtctctgatttccaagtctcggatgctttttcctacccagctagctggaaccgtaaactcgaccaccaccactgcttcatccaactggaaaacttcaatcccatgttggaagaggatcatcttagctagagacatgcccgcttctacctctggtaggatgaccaaatcagccccaatcctctcaaggacttccttggtcacttcatttttaaccttggcaatgacgtgctcgactccaagggccttacagtgcatgaccgccagcacactggactccaggttttcacccgtcgcgatcacgactgtgtcacaggtaccgatatcagccgcatccaagaggtccatttctgtaatgtctccaacaattccagtcgtaatcatggattcatattggttgatcacatctgcgtgatcgtcaattgcaataatatccacatcctgatcctgtaaggttttcaggacactctgtccaaaaattcccaatcctaaaattccaatggttcgattcgccatgagtttctcctatccgataatgatgtctgccttggcatactgcaaggtatctgctttcttggcttggtaattgttcaaactgaccataagggtcaaaggaccaatccgtccgataaacatgaggaccataataatggctagtcccgccccatttaaggtcgaggtcacattggctgtcacgcctactgtcgctagagcggataccacctcaaagaccaaataaataaagcgttggccatccggcgtcaccaaacagattcctaatagacccactaagaaggtcaactggaaaatcaccgccgtcccaaaggaacgttgaacaatgtctggtgaaatggtacgttttcctaaattggtatgtggtagccccaatagttccttccgagccaggagcaagaggaccaggaaggtggtgatcttcatgccccctgctgtcccacccggtgctccacctaaaaacatctgcaagagatagacgaagagcgtcactggccggactgctgtataatctaaggatgcaaaaccagctgtccgcatactgacagtttggaagaagctgaccaagatcttctctcctaatggaagggacccaatcgttgctggattattaaactcggtcaagagactggttactgtcccaaagagaaggatcgcagctgttaaccagagaaccaccttggtatggaagcgaagagtccgccgtcctgattgattacgggccttggtagccaggtcaaaccagaccatgaagcccaagcccccagtaataataagggcagataaggtcatattgaccaaccaatcggtctggaagctcatcatactatcgcccccaaaattatcaaagcccgcattacaaaaggccgagaccgcaacaaagatagagttaaagattccatggccccaaccaaatcgaggaatgaagcgaatcatgaggagcaaggcccccagtccttcgatggtaaaggtggtaatgaaaatagaacggacaaaacgggccaagctctggttattgctaaaactaaaactgtctcgaatggtctgccggtccttgtaactaagtttttggcgaccttccataaagaagagaccgataaaggtcaagatccctaagcctccgatctggatcaagagcatacagatcaattgtcccaaaccattataggtcgaagccaccgactgggtaaagagccccgtcacacagaccatggagaccgctgtaaagaggtggtcgatatagcctgcttttgagctcgcttgctggacaaaaggcagactcaataagagcgagcccaccaggataactaaggcaaagctgagaaatattcgccttgccggagacaggcttttaattttggcctgccattgtttaaaaaataatttgactaacatagcttcattgtatcataaaaagtgaaaagacctacaagtgatgaaccatctctaggcacaattctagggccttctcaaaagcttcagcaccccagtcacgctggtcataattttccaggtctgcaagagaatctgcggtaaataggagcaagccccaaactgcatcacgaagctgggcgaccgctgcaagtgaggcacactccatctccacaacacgacacccttcttcaatgcgataggccaccttgtcaggtgtttctctataaaaaccgtccgtcgaccaggtcatgacctcttgataaggaatatcttttcctttcaagaccgtttcaatagcggtcagtgcacgactgtccacttcgatataacgagaaggcgctacataatggtaactagctccctcatctcgcaaggccttggtcgggatcaaaaaggcattttcttctatatctaccaagacgccacagctacccgaggaaatgatcttcttcaccccatagccaatcaaccaatccatgaattgggcagcagctgcagatccaactggcgcttgggccaagcagactttctctccttggtgctccataacatagaccggatagaccttggtagctgagacaaagctagctacttgtttggctccaacagctttggcaaagcgatcaatctcatcctccaggaaagcataaacacatttttcgggtaggtgcaggtctaacccctcatgggtcggcataatgactgcctgcggattgtcgtcaaactctaaaatgggtatttcatgtttatggatcattgtttctcctttttgacgagtatttctttaatgacacgggctgggtttcctgcaaggaccacattgtctccaaaggacttggtcacgactgctcctgcgccagcaaccacattgtcacccagcgtcacaccaggaaggatggtgacccctcctcctgcccagaaattgtcccctattgtaatcggagcgccatactccagaccagaattgcgctcgtctggatccagtgggtgtaagggggtcaaaaattggcaattaggaccaatcatggcattctttccaatcgtgataggacaaatgtccaacatggtcaaattgtaattggcatagaaattttctcccagatggatgttgaccccataatccacaagaacctgacgattgagatagaggttttcaccggttgaaccaaaccactctttgatgatagctacaccttttttaggatccacctcttggttaaaagcttcctgtttctcccgagaggcttttgccaaagcccgtaattcagggtccgcaggtctataatagtcacccgcaatcattttttcatattcactggccataaggaaacctccacgttattttgacatattatagcagaattccacctttaaaacaaacgtcagaataagggtttgcaagaaaaaagatcataaacacttaaaaatacttaacaaaacttgcatttgcttacaaaataatgtacaataaagacaagaacagaaataaggagcgaattcatgtaccaggaacaacggctcgaaaaaatcctagaacttttagaagagcgaaaacagctatccgctaaagaaatggttgattattttaaggtctcaaaagataccatccgtcgagacttcgctctccttagccaacgccagctggtccgcaggacccacggtgggctccttcccttaaacaaagaacctggcccttcttatctagaccgcagtcaaaaggctaataaggaaaagactgccatggctcaaaaggctctgcaattgatccaagatggacaagtgatttttctcgacgtttccacctcgatgaccctgcttgctggcatgctgaataaggaagtcacagtctattcgcattcccttgacaatgccatccagctcagtagccattcccaggttgactttcatcttttaggaggaaaattctaccctaaaaaccgcttctactatgacgcgaatcaagcacaaatactggacaatcttcgctttgatctcgctttttttggagcgagtagcttagccaacggcgaggtcacctttgaagatgcagaagacgttgccgtcaaatccctcgtctttgaacgggctcgtaccaaggtgctggtggcagaaagcagcaagttctcccaaaatgccaactactatcttgctcgtctcaagcaatttgattattggattaccgaccaaaaaccaagcccggaaatccttaaacaagtcggcaacgaaaccactattctctattaggaggtaatctttatgtctcacattcgtctcatcatcagcgatatcgatggcaccatcttaaatgaccaccatcagatcgatccacagttagcatcattgatcccagatttaaagcgtgaagagatccctttcgtgctagcctctgctcgctcccccaaaggaatggcacccattgccaaagaactcggtatagaagactgccccatggcctgctacaacggggccttgattcaaaaaggcgagcaggttctgtttgagcatcccttagacaagaatgaagctcgtcagtttatcgactgggccaaccaacacttccctcaagtttcgatcaacctctatagcggaaaagactggatgaccgatcatctcgaccaatggagccgagaggaagcccggattacaggggaaaaacctcttattcttcccctattggatcctttgctggatatgacaaagcccctccacaaattgctcttaattggagatgcagaagagatccaagccctctatcgtgctatttctgccgatgacttcccttctaccgccttttatctctccaaagccaactacctagaagttactgctaagcacgtctctaaagaggatgctctggttgaactcgccaaccactaccacttgagcttagaagaagtcctcaccatgggggacaacttcaatgaccttcctatgctcaaaaaagcaggcatcggtgtcgctatgggcaacgctcctcaagaggtgaaagacgaagcagcagtcgtgacaaaggacaataatgaaaacggggctgggcaagcggttgaaacctatgtgttgatctagtcatccgtttaaaaaggacgtcgagtataatacccgacgtcctttttgacgaatgtatagcactaaaactacatcattttcatataaatgctatcccaacaatgtctgcagaattggaaccacaatcacaaataagactgtgctgagagtgaccacattcgttgaaaactcaacatcgcctttaccttgattggcaaggataggaagaactgccaaggctggtgttgctgattgaatcataaaggttctaaattctggtgccaccatatttggagagaagaacttcagaaccaagagcatgatgaccggtgcaagaataaaacgaccaaccagtgtgataatggtatctttatcaaagcgaatcgtcttaagtcctgccttagctaggacgataccgatatagacaagagataagggcgttgttaaactaccaatataagtcaaggtactttccgcaaaacttggaacaggaatacgcaacaccaaaaagacgagggctacgagaaaacctaataaaggagctgggaaaagcttcttccaattaaatgtttgagcctgttttgaagccccttctttactatcagaagtcatcagatagacacctaatgtccaagtagatactgtatttgtaatataataaaccaagaagtaaggaagggcttgatttccaaacaaagcgatatttaaaggcaaaccaataaatatggtattggcattaacaaaggtattaatcatagtccctcgacgacctgggcgcactttaaaaactttcactgcgataaaggccgctaggtaaccaagaatgaaggcgataaacgtgtacaacaaaccgccagacaagctaatcagcttatctaaagttaaatatttaagaacagaggtgaaaattgcaacaggcatggccacgttcataatgagcttagacaagtcatttccgaaactctcttggaaccaaccgcggacttgcaagaaataaccaagaatgatgatgacgataatgggtacaatactctgaattgacgttaaaaagatttccatagtctccctttctatctaacaagacatacacaaaaggtgtacgaggcatcccgtcgcactcgtacaccccattcccatttacttatttatattctgggtaccatttcaaatcacggaccgctttagccatatctgtttcttgagcacgcgcaagaccttgttcttgcgcttttttagcaactgcttctgctactttgatagacacatcagctacatacttgaatggaggtaagactggtgctcctggttcgcctggattgacaataccactcaatgaatgtgcggcagctccaatcatttcatccgtcaacagactcgcttcagaagccagcataccaagtccaagacctggataaatcagtgcgttattcgcttgaccaatcacgtagtccacacctttataggaaactgtaccagctggaattcctgttgcaacaaatgcttttccgtctgaccattcgatcaaatctttggcacttgcttcagctagtttggttgggtttgacaatgggaaaatgataggatgttcagtgttttcacacatagcttctacaatttcttttgtgaaagtatttggctgagttgaagttcccacaagaatggttggtttaaccgtcttcactacttcaagaaggtccgtcaactgatctgcattggcaaaatcagaacgtttcttagcaaatggtttttgttgcggcgttaagtcatccatatcatcaaaaaggagaccttgtttgtcgaccataaagaagcgtttataagcttcttcttcaggcagaccttcactaaccatttcacgaaggacacgagaagcaatccctgcaccagcagtcccaccaccatagcagagataaacttgatccgttaatttttcacctgtaatatccaatgccccaaagatcccaccaagggttacaataccagttccttggatatcatcgttaaaggttgggatttgcttccggtatttttcaaggatgttagcagcatttaagcgaccaaaatcttcccagtgcagatagagtttagggaagaggcgttctgcagtttgaacaaattgatcgataaaatcataataacgatctccacgcacacgttcgtgacgatttcctaagtaattaggattgttacgcaattcttcacggttggtacctgcatcaatgaccaaaggaagcaccgttgaaggatcgattcctgcagctccagtatagaccatcaatttcccaacagaaatatcaacaccatttgtaccccagtcaccaataccgagaataccttctgcatctgtcacaacaataagacgaatttcacggtcccctgctgcatttttcaaagttgcttcgatattttcaggatgattgatatcaagatatgcggcatattgtggatctacaaagagatcgctatacccttcaatggtatcagcaatggttgggtcatagacaatgggattaaattcttccaaatgttgagcaaataggtagtaaaatagagtacgatttgtattaaaaatttccattaggaacaaacgtttttccaaatcattaacctttgtttgcatttgcgcataagtttgcgctgcttgttcttcaatggtttgaacgtaaggtggtaggaggccaatgagacctagttgcttacgttcctctaaagtaaaggcagttcccttgttaaggaaagggttgtttaaaatatcatgtgcagtcatcatgtgacctccttatttattttattctattataacacttattttctttaaatgacactttgttatgtatatgatacaatatgaatgaatcaggcaatgaatgttcaggcgatgcaaccgaaaatgatgcgatttcaaaagataacaaaataataggtttatccatcacttcctagatagtcacggtcatctcttaaaaaagcctgttcctttccaccttttagaaggttattctcatcaaaagatccactgttttcaggtactcttttttccacttatgatgatcaatacctataaaaaccatagataataaatctaaaatatgtttgttataaaatactttgttttgtttaaggtgttatttttgtcatttaaaacttgtattctggttacatgaaaacaaaacattatttacaacggtatatagcgcaaaaggtcaaatatttgcgaaaaaaacaaaacatgagtcaagaggagctatcggaacgggcagatcttggattaaaatacatcaatcaattggaaaatcaaaacgtgaatctgaccattcacagtcttgaaaaagtcatttctgctcttgagttaacgcctgaagaattcttcaattttgattcactcgaagcgtcttcagatcctactgacagcctttcacttaagagagtaaatatgaaaattaagcaacttccagttggaaaaagggagaagatcctaacgattttcgaagatcttttagatagcctttaatggtcctctgactcacctcagattgtaacaaacaaaaaatcatatagtcaaattagctatcacggataatttttgcttatccatgtctgtctatttagaagagggagcccaatgaatcttaaggacttttattattttcttgatcttagtcaacagcaatcctttactggggttgcccaaaaacacgggatcagtcaaccatccgtttcctatgcgattaaacgactagaaaaggaatttcactgtccattaatcgcgcacgatccttctcatcgtactttcaaattgacgccccaaggagaaatcttgctacgacatattcaaaaggtcttacctgagattcaaggggccaaaaaagagatcctccggagtctctctcaattcaatacggttggtttcccaccaatcatcattgactatcttgtccgaaaacaacccgcctttatcagtaatgttgcagctcttcaaagtatccatcctgtccaagaaggatctgttgaacttttagaaatgctttccaaaggagaactagatgctagttttttagggagtttagaaccgattaaagatcatcgcttccaggtaagagaaatggccaaacgagatctcttctatatccttcatcacaaccatccactagcctcaaaaaaagtattacaattttcagacgtcatcgatgaagattttatcattccagacgagcactttgttcatttaaaagcctttgaacagttgaatgagcgctatcaccatgaggctacgcccttctttcagacggatgatattcagctcctaaaacaacttcttcgtaaacaagtggggatcagtttactagcagatcttgcactaacagatgatgaagaggaattgattgccattccgatggatgaagacgaacggatcagcttttacgtttcattagttgaaccgagggaaagtaatctcaaaccggaggtcatccaattctttgaaaaattactaagctaatcacaacctccattctttgtcctgatttagaaacataaataaagtgactagctagtattttttacgactaaaaaatatagtagaaatgccgataaaataaggattcctgcaaatttgtgggaatcctattttctttcgtatgtattgtataattaaattattttgtgtatattttgcttattcagcttattattaataattagagatataaaaagctcgcaaagccttgattattataccgttgacaagcttttcaaaaacctgtatgatagaaaaaagtttattaaaaaggggacgtattttgaaaaaatatactatttcacgtaaacaaactttaactttagcttccgttgttttaggaacggtcttcacaggaacgactattgcttctgctgatgacgttgcacctgcaacaacccaagctgctcctgcagctactacagcaacaaaatcacctatcactgctgcaacagaagaaatcaacgccaaagccaatacaccagttgttcctgctgataaagcaaaaactggagatgtcatcgctgtggacgtcaaaaaaactggcccatctgctaaaacagacggtgcagacaccaccactacctcaacagcaaccatcaaaacgactagcttagccgatcaagacacacctgttggcacttcaaaaccagtctcttctaccaagacagctacatcaaccaaagaaacagctgactacactgagacaacaactgaaacagtcaacaaaacaactgtagtcgaagtgacaaaagaagccgatgtcgtcaacaaaaaagaagtccaaggaacatcagacatcgtctttgtcatcgataaatcaacttcgatggattcacatatcaatgatacaatgaagaatatcgagtcctttgttcgcaatctatctgctaagaaaattcaagcccgtttaggattagctgaatacgaaagagctagtgaagttaaataccatgatttcaatggatcgaagttcacaagtgatccagaaagcttcatttccgccctgaaaaccatcaaaactgatggctactatgaaaatgctactgttccattgcatcatatcgctacttcaggagactacaactgggggactggggcaaacaaccatcgctttgctttcttgattacagatgaggacattgatcttacaaaggatacaccaacaaaagaagcgacactgaaagcccttcaagatgctggtatctctttgacagtggttggtgaaacacgtgaaaaaaaagactttgatccattggtcaatggaacaaatggtctctacctagatatcgacaaaaactttgctaacttgttgaacgttcaatttgccaataaagtcgttgaaaccgtccaaaaaggtcgtgtcttcaaggtacaaacagacaagtatgagttgatctcaaaaactcatcgtgtggcgaaagcaaaaccacaaacacctagcatccaaacgcctgcaacaccgactcctactcctcaaaaaccggctgttgtaacccctgcgaaaccgaccgtattcacaccggctaaaaacgagcctgtgaaaacggaagtttatatcgcaccagcagctcttcctcaaaaagaagcaagccttccaaatacaggaagcaagacctcaattgctttgacgactctaggtcttggtcttcttagcatgggtgctgcctttggcctctctcgtaaaacaaagaaagactaacatgaaaagctaatccgttgattgggctttttatcactcaaaatttcccctttgctattttcattagaaagcggaaatcttcaacttctaccaagaaattcttgtcctccgctatgatataatggggacagtacaagggaggaaaccaatgttacaagaactagcctttacaggccaatggagacgctatcaaaaacgcgttctcgataagagtgacgcttttatggcggatggccatctgcatttggtagcagcgcctggctctggaaaaacaaccctgggaatcgaatttatcagacgcttcggccagccaaccctgatcttagctcctacggtcaccattcgtcaacaatgggtggaccggattatccaagcattcttgaaagatgaaagccaggcagagcaactgatctctcaggacctcaaacatcctaagctaattacagtggctacctatcaggctctacacagtgccatgaaccaagtcgtcggtcaatcgcaagctgaggataccgatgaccaggcagagattgaaacatttgatttcaaaggctttgatatctttactactttcaaagacatctcactcgggaccctttgtttagatgagtgtcaccacttgcgcaatgaatggtggaagagtttggaagcctttcgtcaagccttccctgacttaaagatgatctccctcaccgctacccctccctatgaaggagaccctgccctttgggatcgctatatccgcatgtgtggtgagatcgatgaggaaattacggttcccgaattggtcaaggaagacaccctttgtcctcaccaagactatgtctactttgcctttccaaccaaggaagagcaagagcagttggatgcttttagccaacaaaagaatgctctcttgcagcaactgacttcagatcctctcttttgccaatacctccaaacctgccaggccttatctggtcagatcagtgatgatgagctactcaatgagccccagtatctctctgctaccctgatctttcttcgaagcaagggaatcgcctttcccaaacgtttccaggaccttttaggagccaagaaactacctactttcaccctggactggcttgaaattctcctgcaaggtctgctctttcaagtgcctcactggtacaatctacctgaggaatacgagaagcaagtcctccatgaactaaaagcagccagcttgatcgatcgaaaacaagttaaacttgtccgcaacaaaaaacaagaccttctgctcaaccaatccctcggaaaactcaatgccgttcgtgagattttcaaggcggaataccaggcgcttggaaatcaactgcgccaactggtcctaacagactatatccgccaagactttgaagttcatctcggggataaggacgcccaatttactcaattgggagttctctcttatttcgaatccattcgcagggaaagcttagagcaagcaactcctcctgccatcgctgttttgaccggtagcatcgtcatcattccgacggtcgctaagtcaagactagaagagcttctaggagggaatcgactgacttaccaaagtgtcggccaattatctcctgatgactttctcaaggttcgcttggttggttctcagcatgatttggtgacagccgtgacccagctctttcaagaagggctcatccaagtcgtcattggaaccaagtcacttctaggggaaggctgggatgctccttgcgtcaattccctgatcctagcgagctttgtcggcagttttatgctcagtaaccaaatgcggggtcgtgccatccgagtgtggcctgaggatccagacaagaccagtaacatctggcatctagtctctatcaacctttccctaaagaaatggtatgaaaagtccgatcttgaaaaggaagagatcgaagccatcactgatcagttgaaagaatacagtcctgatttggagctcttagaaagacggatgaagcaatttttaggccttcattacaaggagcccttcatcgaatccggtatcgaacgcctagcctttgacaatattcgctataccaaaaaacagttacaaaaactcaatgaagagaccttagagcgctccacccatcgtcaagaactccgagacggctggcaaaaagccctgcctattctggagaatatggagattgcaaatgaggtccaagtggataaacacttcctgcctctggccctattcttcgatgccagaaagctggctcgttggctgacggccgccactttgaccgatgctttcgccaaccttttttactattcacatagaggaggagggaataaagcgtctctaattcttctattcgttttagctgttctcgctctccttgcctggctccgctactatctctataagagcccttataaacggttagaggtctttggacaagctattcaccaagccttgctcctctctgggcatattcaaacccaggagacccgtatccaagtcgtacgagacagaaaggatgccatcaacacgctgatttatttgaagggcggaaccatgcgggagaaggaactcttctcgcaaaccataatcgaattcttcgcaccgattgaaaatcagcgctatatcttgaaagcacaggaaaaggtatccgatcaaacagaatatttcgctgtaccaagcctctttgacaaacggaaagaggatgcccaagcctttgtcgcgcaaatccgaaagagtataggcaagtatgacctcgtctatacccgaagtgtcgaaggtcgcgccattctcctagatgctcgcatcaaggctctagctaacaaacaagagcgcaccttcaccaagaaacaagtgatgtcggatttgaaataaaactgatttcactacaaaaaaattctagtagacatcctctactagaattttttgttagtcaagtacaatcatagccttaatagtcttacgttcatccatgtccttataagcttggtcgatatcttccagtttatagcttgaagtaaagacacgacccggattaatatcaccgtcaagaactgcttttaacaaaacttgtttatcataagtagtaactgaggctgctccacctgccactgagatattttgggcgaaggtcgaaccaagggcacggttattgtagtgtggcacaccgacaaatcccatacgtccaccattgtgaaggaccccaagggcttgatcgacagctgccgcggtaccgacacattcaagggccgcatctgctcctcctccgaggatttcacgaaccttggcaatcccttcttcaccacgctcagccacaaccgctgtcgcgcctgactccaaggccatctgttgacggtcttcgtggcgactcataaggacgatttgagacgcaccacgcatcttagctgcgatcactgcacattgaccaacggcaccgtccccaatgaccacgactttgtcacctttttgcacatctgctacacgcgccgcatgatagcccgtcggcatgacatctgctagcgtcaagaaggatttaagcatagcttctgtataatcagaaggttgccctggaatcttgacaagggcccaattagcaaagtggaaacggatgtactccgcttgcactccatcagaccagttggtgccgatatgacggtcacaagtcccatcgtagccagcacgacaggcatcacactctccacagccatgggtgaaaggtgcaatgacaaaatctcccggtttgaccgttgtaatggcctcaccgatttcttcgacaatcccaatggcttcgtggccactattttggtgccccgcttcaatatctggattacggtagctccatagatcggatccacagacacaggtgcgaacgatacggagaatgacatcatctggcgcttcgatctgtggacgttccacttctacaaggcccacttgcccagcttctgtatagactgttttcttcatagggacgacctactttctattgcttacttatctatagtatacactttttatcgagcttctgctcataccaagtcgtcattaatggtggtgatgatcatgcccatgaccttgatcagtttccaggtcttcgatatttctcttgtgagctcggtgggttgccaagtcttcatctacctcaatggtgacgttttgaaagccacaatctttgagcaaggtacgaatcgcttctttacaaacctccatgtggttgacatgctctagacaaacatggacaatggcgttcttttccagcccatccatggtccagagattaagctgattgatactagccacatggtccaactgttccaaatcactcttgacttgctggatatctactccttctggcacggcatccaggaaaatcctgagcgtgctccaaaaacgtggaatggcttttgacagaataaagatggaaatggcaagagataagagcggatccaggatataccagtcggtaaatcggagaacaatggccattaagatgacagccacccaacctaaggtatcttccagaaagtgcaggctgagaatggattcgttcttggtttgccctttgcgaatgacgagactcgctagcacattgatgctgacggctatgattccaagccagagaatgccctcatcgttgacaggttgtgggtgaaccaatttcgttatattttccaaaataaccagaacggaccctgtcatgagaatcacagctgttaccatggcccctaaaaggctaaagcgcttgtagcccaaggtatagtggctgtcttcttcacgattggaaatactctccaaaaaggcggagatcccaatagcgattgcatcccccaagtcatggaccgaatccgcaaggactgcactggatccaaaaatccctcctgcaataaactcaacaatggcataactcaaattcaagaaaaaagcgatccagaccgcatgttttgtcttcataatccttaatcctctgatataatagattcatgaacatcatgttcattatctattatccactactatcaacagaaaggataggagcaaactgtttagggtgtacgttactgaacaatttgttcaaattgtccatatgaatactcaggatcgtcgcatcaccaaaactcgaaaagctatctatcaagctttcttacacttactcaaccaaaaagactacgaggccatcaccgttcaggaaattatagaccttgctgatgtggggcgctcgaccttttacagccattacgagagcaaggaattattgctagatgaactctgtcaaaaactctttcaccatctctttgagcgtgctgaacacctctcaccacaagactatctggcccatatcttccagcatttcaagaaaaatcaagatcatgtgaccagtctcttgctctctaaaaacgattattttatacggcaactgcgaaaagaactagaacacgatgtctacccaatggtagccgacgaactcatcaaggcccatccaactctccctcactcttacctcaaacacctggtcgtcagccatttcatcgaaaccctcagctggtggttgaaaaaaggcaagtcctacaccgaacaagaagtgacccagttttatttggagattttaaaagtggggtcgaactagaagggagtattttcaatgaccagcgtacaattttactttctatttccatcactcttcatgcttcacgaactggaagaaatcgtttggatgccatcctttgtcaaaaaaatatcaatccagtatccaaacaatcgaatcctaacttattacactccttttgctttcaactttattgtcttggagcaatttctcatcctaatgacgtctctatatcttagttaccagtttaataactatagcatttacgcaagcatcataatcgcttatatctaccatgtattcggacatctgattcaaacaatcgttatacgaaaatacgtgcctgggttgttaacgggcattttaacaagttacttttctatcatttccctcaaaaatgaaattccaattacactttatggttactctctttttaccttattggttattattttaaatcttgtagtatcatttatgattcttcataaaatcagtcataaaaaatagtactcaggcaatcatatcttagaaaggaaaccctatgttcttccccattcttctcggctttttgacagccttctttgcccttgcttttgctcttcttcacttattggcttctctttctgaagttaaaaaaggaaatcacactctaggaaatacatttctcctcatcggaagtagtcttgcgaccttatctctcaccctctacttctttttaccgattgtctctctagtcctttggttgatcggctgtggtttgatttgctacggggcctattggaatgggaaacacaaagggaacttccatccagctcaccacctgattcggatgggcatcgctctagtccttaccatcttgttagccttgttataagaaaagctcaagtttttttaaaacttgagcttttgtatttgctatttgttaagccatcaacagcataagaatagggatcaccaccatggttgcaagggtcgtctctgtcaccatgacggctgcataatcactatcagctccgtagagtctggcaacaaccggcgcattggtcatcacaggcatggcggactgaatgataaagacttgcttcatcaagcttggaagaggtgcccagtaaacaatgatcgccatcaaaagtggggcaaccacgaagcgtcctaacaagattaagaattggtcttttttcagagtcagctgctttagtcctgcattggacactgataaaccaataaatatcatggataaaggagttgttaaattgcccagatactgcaaatcactggctagaaaggcagggagcttgatatgaagaatcaccaagactagccctaagagaaagcccatgaggggaggagaaaagacttttttcagactggttctgatatcaaactgcgcttctccttcgccatctcgctggatcaggtaggtccccaaggtccaaaaaaaggtcgtattacacatgtaatagatcaaaacatagggaatgctggcatccccgaaaagggcctggttgatggggagccccacaaaaatcgtattggaattaaaaaacatggaaataaagaggccacggcggtcctgcctcactgcaaagatccttgctactgctgtcgcgatgccaagtaaaatgatcatagacagggcaggaaaacgcaattctggcaacatttttaggagggttgccgccgtaaaacgctgtgtgatggtgtagagcatatagcagggaagagcaacttgagtgaccaatttagcgatcaggccacgtgacttgtcatcaaaccagcctttttcacctatgacaaagcccactaaaatcatacctagaatgacaaggatacctgatatacttctcaaaaagatctccatgttttctccttttctttttataaatttgaactagaaaatatcattttttacaagtctcaaaaactactctagtatatcataaaaagaggtggggcaacattgcccaacctcatgcattttattaattgtcactaataccccttcttagcagctttcgtccattggtaccaaccaactactgttgataaggtaaatcaagaaaaaccaataaaatggtggggactatggcgaaaatagatgattcagttaaaaagaaagttccagaattgcgatttaaaggattcacggatgaatgggaacagcgtaagttgggagacgaagttcgaatagtgatgggacagtctcctaattcagaaaattatactgatgatcctaatgggcgctaaaaatgcgaagacctatgaagacctattttgtattagtcaaacaaaagatccaaaagaaatggtatatgattatgaccatgaaacaaagtaaaatcaaaccgagtgatctgaggaagcacccgatgatcatgaaacgttattaaacacaaaagtcacccatgtgagttcttgccagaagctgaagttaatccttcaacctggaaaacccgaagaggtgactttttctatacatctcgatttttctggtaataatcattaaccgataaatatgtctgtgaatcacccagcgactccgctatgtccataatccgcggtggtagtaatcccactcgctggacaagttcgtgatcgctgaacaattcccgtggactgccggcgaagccaaacttcccgtgttccataacatacaccgactcaaactcggcggcgacccaatccatgtcatgggtgatggtcacaacttggtggcccgaatcagccaactcatggaaaattgcggtcaacttgcgccggctttcccaatcaagcgacatcatcggctcatcaaataaataaatcgccggatccactgccaaaactgtggcaacgctcaacagcttgcgttccgacaatgacaggtcatatggactttcagctgttttatcatccaagccaactctttttagagccgctaaagcccgcctcgtaatcgtgtcgtggtcatccatgacctgcgcgacactccactccacctctcgttgaacggtcgggttgaaaagctgatcgtcaggattctgaaaagtaatcccaaccttcagtaacttttcgactggtttaagatcattaaaattttctccatcgatcttaatcacaccggtttgtggtgtcagcaagcccgtcaacaatttgaagagcgttgatttgccggcaccattttggccgacaatcgccaccatcggatcggcgaagtgtttgtcttcaacatccaagctaaaggaccgttccggataagtgaacgtcaggtggttcaattcaattgtggacataacaaacctccttcagttcagcgtcattcaccggataccggccatcagccaagtgccaatccattttttgagcaagttgctggattgtcggggctggaatctgccagtcagctgccaaatgattaaacacctcacccggcctgccctgggctaccatttgaccctcgtgcagcacccatacaacgtcggcgacttcgcacaaatcgtcaatttcactggtgacaatgaagacagtcgtctctttgacttgggccagccattggaaaaattgtcggcggccaaggggatccatctgactggtcggatcatccataatcaaaacagccgggttagccgcaatcgccgtggcaattgccaaccgctggctctgaccaccggaaaggctatcgggacgcaaattcagctgttcaatcagccccatttgcgtggcaacttcttcaacccgtttttgaatcagtccttcagccattccctgattaatcaagtcaaaggcgatttcatcggcaactgtgtctgccaacccgcttagttggccagctggattttgcagtacaactccattcatggcattataaacgggccaattgtcggacactcgctggccaaacatgtgccagtcgccctcaatctcagcagacaccattttgggaatgacccctgccagaacacggcacaaagtcgatttgccggagtgactattcccgataatcccaaccacctggccggtatgaacctccgcgttaatctgacgcagttgtggttgctcagtacccggataacgggtggtcaaatttttaattacaatccgtttatcttcgtccatatcttccatccaatcaataaaattgccaatccagtcagaccaatgtgcagcgtccgcgacaggcgatacacgcgctgggaggttctgacagtccggttgagattatcaaaacctctcagctggagagaaatcgaccgcgccatcgattgatccaaggtcttaatcaccaatggaattagaaccggcaggactgactttaatttctgaatcaacgttttttgcggattggttccgcgaactttttgtgcctgctggattttccgcatattgcgcatcatttccggcaaaatataacacaccgacatcagaacgtagacggttttataagacaatccggacagttccaaataggccgagttttctgaaatactcgtggtcaccataaaaaagccactggtcaaaataatcaccaatactcgacaacccagagtggtggcgtaaatcaggccttctttgtagaacgacaccccaagcacagaaaacagcacagtttgattccgactgtaaaataacccttggatgatcagcatggtgcaaatcataaacaggctgaatcccagcgccttaaagatggtagaactcaatttggaaaataacaatagcagtgttgcgacaagaattaatccggcctgaagcaataaattcatactggcaaagctcaacaacgtcatgtccaagatgaacaagagcttagtaatcggatcgatcacctggtaccacttgagcttgacccctggcgctccagaaatcaatgtttgatcagtcatcatttatcaccgctaaagaagtgcaccatccgcttcggcagctgacgatagatgaagaatgccaggtaggccacgcagactttatccaaaatatccaagacaaactcatcgataaatgaggccagccacactggtgcatgattggcgaccattaccgcaaacaatgagtcaccccaagcgataccggtctgaccaccccaaaagatgacgttgagtggcgttgaaatggcagctgaaatgatggcaataataatagcagaaacaaatactcgtcgcgctgacgagaaccacccattggcgtgcaaaactccgacagcaatcccaattccgatgctggtaatcgcatacacggttgaaattggcgataaggtcagcccatagatcacgttgttgatgaaaccactgatggcaccggcaaccggcccagccaacatgctggcaagaaaggttcccaaagaccccagccaaacgggcaactttaacccctccgccaaggctttggcaacatagttaatccccacggcagcgggaatcaaagtcatggtggcagcacttaacttaaatttccacatactggtacgatgaatcggttctgttttcataatcttctccttttgtttttaaagagccgtgtctgtttagactttcggacgcaacgctctgtagatttttgatttgaaccgcttcacctttcacagatcccttagccgacatcagggtttctcttgaaaaggattgttcaacagttcacaactaatcatacgcctatttcatcagaagtcaagaattttctgaagttttcttgaaaacgttcgggaattgaaaaatagagcgagcgcccatgagaacgatcactaaacaattataagaggccactataaaaaacaaacaccatttctggtgtttgtttcattttataaaggaagcactagcttattttttctttttcttcaaaatataagctgcaatgcttgccaagacaaaggctaaaactaagctaataatagagatggtcgtacctgtatttggtaagaatcctaagatcttgcctggtttcttcggctctggttggcttggttttttaggttcaggttgacccggtttctttggttcagatgaacttggaggagttggttgttttggagtttcttttggaacatgcttgttggtaatcacaacatttcctttaccatcctcgtcgttacgagcttcatagccctttggaacactgacttctctcactgtataagtgatggtgtttccatttgctttttcatctaaatctgcaaaggtatgggtccacttgttttcagctgacaattctacttcttgaccgactttttgatcattggcatagagttgaacgcgaatactcttcggacgaattccatccttgtcattctcatcatcccacttcttagtgaccgtgacgcttgtcttaccaggtgcatgggtattggtaatggtataagcagcctgatcaattgtagtcgtatattcagctaccttctcttcttgaagagtatagacgatttcttttccatccttgaattttggtagacctgtgaagctttctttccaatctgtcgcattggtcagttctttttgagcaactttttcaccattggcaagaagattcactacgatacttgctggacgaagaccatcttgattgtcttggtcattccaaatcttggtcactggaatatcgatcacttctggcgtatgcgtattggtcaagatcgtgtgagcagcgtcagaagtatcagcagtgacttggtagccttcaggaacagcgacttcttccacacggtagctgatcacttgaccagctttcttttcagctaatttgctaaaggtatgagtccattgattgtccgctgacaactccactggatctcctactttttcatcaccagcatagagttgaaccttaatggattttggacgaagaccatcttggtcattggcatcttcccacttcttagtgactttcatctctgtgagggctggttcatgcgtattggtcaagacaacattggccttgtccttatcatttaccgtcaccttgtaaccatctggaacagtgacttctttcaccgtataagtgatggcttttccagctgccttaacatcaaggttttcaaatgcacctttccagtcattcgctgctgaaagttctaccacttgatccgtcgcaagaccatctttgtataattgaacttgaatgctggctggacggagaccatcttggtcgtctccatcttcccacttcttgctcacttctactttggtcttttctggttcgtgcgtgttggtcacgactacttgacctgggttagttgcttcgacagcttgtgtgtagccttctggaacatcgatttctttgactgtatagttgatcacttggccagctttcttctcatctaggtttgagaaggtatgggtccatttgttatctgctgacaattcaaccgccttaccaaccttttgatcaccagcatacaattgaaccttgattgtttttggacgaaggccatcttggttattggcatccttccaatttttcgtaacagtgaggcttgtcttacctggtttgtaagtattggtaatcgtagttccatcaatcttagtagtgtaattgtccactttgtcttccgtcactgtgtagacaactttttgaccatctttatagacgggtaggtctgtgaaggtatgagtccattcatctccttcaccagtcagatcaagagcttgtacctctgttccatttgccaagaggtgaactttgatggtagatgggcgaagaccatcttggttttgtgcatcatcccagactttcttgactgtaaccgtcgttgtctcaggagtgcgcttgttggtgatggtggcttttccatctgtgaagctggcttcttctgtatcgaccgtataatgagtcggaactttcacttctttaacagtgtaggtattgagcttgccatcactgtctttatctggaagattcgtaaagtgggctttccagtctgttgcggctgaaaccgtgattggttttcctttagctttgccattcttatagagttggaattccacacttgctgggcgaagaccttcttggttgtcttggtcatcccaaacttttgaagcttcaagatcgagatacttgatatctgcttcattagcgatctcaactgggactgcttttgatccgactgattttccatccaccgtgacgtggtagatttgtttgtccgcatcataggtaacaaccacggcatgttctgtttcatccaacttatagttttcaggtgctttggtttcttttagcgtataggttccttctgttaaggtgttaaaggaaagttccccttttttatcagaaattgccgtcgcaacaaccgcgccatttgcatcagttaaggtaaattcagcaccttcaagaactttcttaggatcatccttgtccaccttcttgacgtggaaagcagccgagaagatttgtgcagttacggtattagactcacgatttccttcatgacctttcgccttgtaaccaaactggttatgggcttgaacaagaccagaacgaccgccgttatcttcattatctttggtgcgtttttgcatcaaagccttgacttcatcagtcaattcacttggatttacaactgggacaccaaagcttgcttcaccacgcgcaggaatcgtggtaccagcatttgcaactaacttgattcctgttacttgactgtaatcagccacagctgtcgtccagatatccttgtcagcagcttgcgccatggtatctgtcgtaacgcctgtatcagttgtatagtagaccgtccatccttctggagctgtcactggtccacgaaggctgaccgtgtattctgtcatccgaccagatccgtctagtgtgttaacgtcttttacttttggtaggacatcatagacaactccgtcttctactgccttatccgtattatttttaatggtgagtttgtagttaaaggtttcaccaggtttgaaggtacgcgtcacaatcgaagcgtctgacaggtcatcgtttttagcaatatatttgcgtgcatagattccttcagccgcaacaatcgtatagtttgattgggcatatggaattttatccgttgttgaaccattaccatttaggtcgtaaacgtcttccgttacccgatcagggttggcattttcaagatcgtggatgccgtttccagcgacataaactttattggtgaaggtcccaccatcgtctttccctttcagatcggccacgataaatggtaaacgtacgcgattaagatcttgaagagaagctttaataaactctttttgatccaaatgcatgatgagagctgtccgtccagaattgtggtagttttcaatgacatcgtagctctttaagaatttcatccctttttcattagaggcaaggtttctctcaaaatctttatagtcgactttaagggtatttggatcataaagatcaatgattcgcaggtctccataatccttatcaggatctaaaactactttggttgccatcaaaccaaaacgaatattttgtccatcagtataacgaacatcattgtaatccgtcgtttttgaaatctcaaagctttccttcaaaggaatcagcttaaaggtccaatctgatgtttggtctttagcaacatttgattgtgtttgataagtgacacgacctgtattcttgaattcattcttggtcgtatcattttcatcgtaacgagtcttttctggatctttgaagcttgtataggtattgaggcgaattccttgaccagattttaggacaaaatcatccttcatttccatccgccaaccgacaacggttccatacttggttaagtcgataaaaccattgccgtctttatcggtttctggctgaacttctttttgactaccatcttctaaagtaaggatgatgcgtttcacatatttgctaatatactcaccaataccgtaatttccttgcataagacgagcgtaatcaatcttggtgaattttaaccgagagtccactgtctcatcatagaaaacaaaattcttttgtgtcgaaggagttttattatcaaaagcgatgatccatttatagtttgctgccttgtattcagttgaatcatagacatcaccatctgcttttttggcaaaacttccagccccttccaggtcacgagaggtcaagcggaaaatgagggaatcttcagctgtaatatccggttctccctctccacggttagcagggatcccaacaacactacctgtatttgtcaaatccttactgagaacatccttcagcgtttgatccttctctaataccaaatccgggaatttcaagtagaggtaacttgtattcttgatttttgccatgaattcttggtgataagctgctggattatcgtttgcatctgctgtaaacgtcttagaaacggtgccatctccattatctacccagccttcagacttagctgtatctaaaactgctgtccgggtattgccatttttatctgtataggttggcaacttatcggtaagcgttactgattctaattgacgatattgtcccccatactgtccttgcattccctccaattgaaatgcaaatggaacagatgatggggtttcaatataattttttccgtcagcccctttgacaacaccaggcatggcttccgcatagtccttggacatggcttcgttcaagttttggttgatatacttggttaagcgatagtcattgtacttgggtttccaaatgatatcattgagttttgcttcttgaccattgatattcaaggtacccgtaatatccaatgaataattggtcggtgcataaccgactttaaattttccaataaatggtaaagtcaggacctcagacttttggtaattgttaaagtgaagtgtgacttgataatcatctccaacttttgtaaccgttggtttgtcatgctctgaagcactattgaagtcagggaaactaacttctcgtaagtactttccaggaaccttcaaggtcaccgttacttcattaatatccgttgtcaaattcttaggggtgatctggatataaccagacatggtatcccctgtataataggacatcccatctggatggttctgtttatccccatacataagggcaacatccaaggccccattatccccgactgctagctcattggcaaaggctgtgatcgccccttggccaagctggcctagcatcatgaaaattgttaaaatggcaaaaccttttttcaaaaagtctttccataatgaacgaagctttttcatgtcttatctcctttacttttgttagccttccaaaaggccctccctttaattttatcacttattttttaaaatatcctttgcttttcaaattaaatcatcactattcaataatatagacattatttacaatgatgtctatattataaatcactatctggtactgatttcccctttcttatatccaagggcaagaaaataaaacatttataaacaaggaggagcagtctgccaattcttattcttccttgattttcttcatacaaaaaaactcaaacacatctgcttgagttttgtacaccctactattggttggttattttatctaactcttcaccatttgaaggaatcttttgtttttcccttctctctcgtacccacagcatggctagtccaaagaggtggctgccaaacaaggccgtcacaaaaatcagcttgcccctgtctggataagagagaggggggctgctaaagccatagcgagcccactcgataaagatcggatgcgaaaagtaaagagctatactcatttgctttaaatactgtaaattatagcttttcaaaaaggacgatcgcaggcaggcattgacaaaataaacggtcacaaaaggaagaagaaagaaaaagttcttatcaattccttcgtgttgaaaaataatgatcccttctagacagagcaatccaaaggcaagagctagcttttgccaacggtgaattctaaaagtttgtgcatgaaaatggtcatacagataataacccatataaataaaaatgggcgtgtaaaagagaccatttcgcgctgtaaaaaataaattgctgtagagctggtaacctttgagaagacttgttgtgtccagataagccgaataggtctcgatcaagccccagcaataaagaagaaaggtgatcaaccccgtccaaaccatacctaggtatttgaccaattgattgaccaaaaacaaacccagcaaaaaggctgggatataccagagttggtagcacatccccagatagatcagtgcaatgagaacacctgctggaaaaagatagacaggaagacgaagactagagaaaaagagccaagcatacggaaggtaaacaaaactccaaaacaaataggtttttacgattttgaccagataggccttcattttctgagaattccctagtgattgcttaaagaaaaagctggcacagacgataaaaaatggcaccgctagccggccaagcatactcttgagaccaaaatgcaccggctcatatgaagttaagcgaccactatgcaccaaaatcactgcaatcgcaaacagatattgaaagagactaatactagaagtattgtagagggaattcttttgcatgttcctactccttgcaaaatgcagaatctaaggttattttagcatgaaagaaaggccggggcaaggaatcttgtatcctgatctaccttttttcctctatttttgatatactcaaagcatgcacaaacaaacgattattgattttaaagaacttggattgcgacaccttttcaccaagcccataaaagaattaaaaaccagagacctcgaccaagtagaggcacttcttaaagaagtggaaacttaccaggaggctggtttttatgctgtcggctatgtcagctatgaggcagcacctgcatttgagaaaaaattagctgtccaccctgctcctctcatgggagagtatctcctctacttcactatccaccaggaggttgaaacccttcctttcccagaggactatgaagcagtggacctgccagccaattggaaggaagaggtcgaggctcccgcttaccaagaagccatcaagactatccatcaccacatccgccagggggatacctatcaggtcaactacaccgtccagctttctcaagagctagaggcggatcctctcgccatctacaaccgactagtggtagagcagaaagctcattacaatgccttcatccaacatgatgatgtagccatcctctccattagccctgagctcttttttgagcaagacgaccggctactgaccactcgccctatgaagggaacgacacgccgcgggcttaccaaccaagcggatctcaaagaggctgcttggctagaagccgatccaaaaaatcgagcagaaaacatgatgatcgtcgacctcctccgcaatgacatgaaccggatttcggagattggaagtgagcaggtgacccatctctgccaagtcgagcaatactccaccgtttggcagatgacctcgaccattgaaagtcacttacgagctgagatcgacctggtccaaaccttccgagctctctttccttgtggctcgattacaggagcaccaaagatctccactatggaaatcatccaaaagacggagaaggctcctcgaggtgtctactgtggaacgatcggcatccttcttccaagagggaaacggatttttaatgtggccatccggacccttcaaatgcagggggatcaagccatctatggcgtgggaggaggcatcacttgggatagcaaatgggaaggtgaataccaggaaaccaagcaaaaatcggctgtcctctaccgacaagagtctcactttgagctcctgacgaccggccgcatccaccaaggagagttgactttcctcgaccaacatgtaacacgcttgagggaagctagtcgctactttgcctatccttatgatgagtcgaagctcctgaaagaacttcaagaagagcttgctcatttggagtccaaccttgattatcgttgtcggattgccttgcaaaaaaacgggaccttccacctagagatcacggagctgacagacttgccagctagctatctacaggcccaactgacagagcagaagcttgatttagcgacgccatttacttatttcaaaacgagtcagagagaccatctcaaccagtcagatcacgagcaaattttccatctgccagacggaaccttgctagagacgacgattggcaatctggtgctggagatagagggacaactctataccccaccagctcacctccccttactcgatggcatttatcggcgccatcttcttgagacccagcaggtggaagaaaaactcttgactctgaacgatttaacagacgctgatcgtatttatgcctgcaatgctcttcgtggtctctacgaactcgattttcaaagaaaggattcctgatgaaacttatttttttacatggactagggcaagatgtcctctcttggcaaggagtccaatttgcactttcacccttgcactccaaaacttttgatattttctcccatccaaaagaaagctatcaggaagtcaaagaaaggttgatggagcgcctccagcaagaaagcgaaccctttattctggtaggactctcactaggtggcgtgctcgctcttgatctctccagacaagacttcccgcaactcaagggcttagtccttgtaggaacacaatacaaacttaacaccaatcccctctatcggctccagatccttctctttcgtctacttcccaagcatgtctttgaaaaacaagatgccaataaacaacagatgcttcaaatcttgaccgaattaaaagggctcaatttaaccgataccgttaaagcttgccctcttcctagcttagttgtttgtggtagcagagattgggccaatcaatcttcttctaaaaaattggccaagctcctgccaaaaggccgctatcaagaaattgcagacggaggccatctactcaataccgagaaaccctatgaactcgcgcaagccatcaaggagtttgtcgctgggttttaaaatgaagaggctagcttaaaaaacagttcctcttaatgtagataaagtattttttcatgttatataacttaaaaaatcaagaactttaaagaaatgtttatttttaaagttatgcatgaatttcttgaggctttccgccgtgagaaaagtgcctgaaacacaattgtttcaggcactcgggagttttgagaccttagactcaaaactaagtcatggaacttctttgaagttcgctgacgtccgtactcacctaaggaaagcctctaggaaaacttagtcttaaagtcacggctaactttttaaaagttagtcgtttttttagaaatatttgagaattgcttgatagttatttgaaaagcaagctgtatactaagagtgtaaagaaaacaactagtcatttggacgaaggagaaaaccatggaaaaagtattagaaatttcccatttgagtaaaaaatttggtcaacaatacgccttaaatgatgtgaatctcaccattcgcaaaggcgacgtttatggcctgatcggtaagaacggggctgggaaaaccactctcatcaagatcatcacccagctgattcaagaaactgacggaagcgtctctctctttgcttctacaaatcgctcccagtggacccaagccttgaaacgggttggatctgtcattgaaagtcccgtggctcacaagcatatgaccgcctatcaaaacctggtctactattgcaaggctcgccatattcccaatcccgaccaggtcatcaaagaaaccttgaactatgttggcctgaataatacgggtaagaagaaattccgtgatttttcactcgggatgaaacaacggttgggaattgcgattgctctcattgctaagccagatttccttattctggacgaacccatcaatggccttgatccagtcggaatcaaggaattccgtcagatgatcaaacgcctcaatgatgaactcggcatgaccatcctcatttccagtcacatcctctccgaactctatctggttgccaatcgctttggcattgtcgaccaaggacgcctgatcaaagaaattagcaaggctgaattcgaagaacaaggagaagactacatcatcctcaagacaagtcagctagcccttgcgagtcaactgatccaggatcaactccatcaccgcatcaaggtcatcgataaggatggagaaatccatatcttcggacagactcacgatattaaagtcattgtcaaagccctcgttcaagccgatattgacgtggacgaaatctactatgcccgccaagatctggaaaaattctttacggacttggtagactagtccaatcaccgtcttcctctattacctatcccacatatttcatttaggagatttatcatgttgcataccattcaagcagatttttacagactttttcgctccaaaggtttttggattacagaagccattctcgttctcaacatcctgtctggagtcatctttggagctactggccacgtcggcgtcaatacggaatccaaattgccccaagcgaccgaagtttggacaggctttaaagctttgaccaactactcttccagcatcagtgtgactatcctctttaccattattgtcatcaccttggtcctgggaacagacttaacgcaaaacttatacaagaatagtctggcctatggcgtttcgcgcaccagttactactttgccaaaagcgccgttgttctgaccattgctctcttccaatttcttgtttcttatggtctcgtcttcttgatcgcgacgctctacaatggacttggcaccatgccagagcacttccttgctcattttggactgaccgtgctgattcagttcctttccaccttggcttgggtcagcatcatttccttccttctttatgccagccaatccatcaccttggccttcgttggctacttcattggaaatatcctcttaagccttcctgcgctcttccttaaagatattgatattctccactatctaaacttggaattccaatattccatggtacagagcacaacagcaacaaccaacaccctctcgatcgcccttggattcatccttgttttcggattcttgggactcgctacttttaaacacaaagatttataacaaaaatgcttgagcggtgctcaagcattttttcttagtgtaatggtcaaaacaaaccagtctgcttccgtcgccagttgcaagtcgccgcctaagatctctacaaaattttgaataatgtagagacccaagccagaagactcttctgtatccgacagattttcagagtagaatcgactagccagttggtctaaatgttggatcggttgttgcacaatattgcgcaattcgacccgaatcgtgtccgcgtccgacatcaaggtcaaacgcgcctgctcctttccatgtttgaggacattgctgagcatattttgcaagaggcgctcccaaagctcaggatcggtcgcataatgaagatgctcttctagctccacctctaaggcaatccccgcctcagtcaagctatcataatactggaacaactgctgggttaagacttgactgagattaacgtttgaaatccgaggctgaatagctccctccatcaagcgtctgtattccaagagagattccaaacgttttgagacgacttgaagattggaagcaattttcttcagcttctcctcttcctgcgtcccacccttaatgatttgttgggtatagcccgacgcaatggtcaaaggtgtccgaatatcgtgagcaatattactgatggccatatccaaggtctttttctcttgaaaggcaatccgattggtccgctcgatctgatcaaagagatcactgacctgcttggtcaaggcgaccaattctttttttgagagctgagaggtcagccgtaccccacttccgctttgaagtttcttttgaatctgctcctgcaaatcctttaaggcagaaagcaagcgagcatagcccaaacccaagagaaggacaaggacgacaagaattagaactaaaacccacattacttgtctcctttcaagcgaacacccaagccccagaccgtttcaatatagtcctcatctggatcaagctgggcaattttctttcggagattgcttaattgagcattgagggtattgtctccaggcagataaacttcttcccagaccgcctcatacaattcttctttggtgaaaatcttctttggatgtgacagcaaggtctcaaaaatttgaaattcttttttgcccaagcgaagcgtctgttctccggactccaattcaaaggtttctggatttaagaccaaattcttaaaggatagcttttgcgacgattgagcttcctgtgctaccgtcggttgatttctcaactgcaccgtcacccgagccgccacttcgtccagattaaagggcttgacaatataatcattggcacctgcaaggagatactggctaatgaggtgtttatctcccagagcggtcatcatgataaccggtgtttgactctgcaaacggatctcctccaggacctgatccccattcttccctggaagcatgatatccagaaggaccaaatcaacagcttcttgctggaagagtcgcagcccttctgtaccggaaaaagcctgaaggacctcatggtcttcacttaagagactgtataaaatttcttggatatcattattatcctcgattaataaaatccgtgccacttgcctcgctccttttttcttttcttgtgaaatcagttctattcccctagcctatcaaataaagggaccttcgtcaatgaaaatctgataaaattctattgtccccaggtagatctgcatgttaggtcatcacaagatgaacttgacgatcctttctttcaaagggtataataggaccaatgacacaatagggagactcatctatgaaaaataatgctaaaactaaaatcagtcttgtatccatccttgtcatcctgggcgttgctgcaagaatgatgcgagtcatccaccgccagcaaatcagggagcaaaacagacaaaccatccaaacgactaaaaaggttgcagagtttcagaaaacactagacgaggaagaaacgaagaaacgcaacgaaaccttcaacaagatttataatgaatcccttgttcggacaaaatttgagaactggaaaaaagtcgatgaacttcatggtttgggacaaagaactgggcaattttatatctataactttgaaaaaaaagaagagattctcttagagaatacagatcaagcatttgttctacccattcgatacaagagcgataacatcacatttcaggctatctttgcccacaaggacggtcagtggcatatcctagagccagacggaagttcacagttgcaactaggagcagccaacgtttccgctgaatctaagtttgtcatcgagaataatgtcttagattacgaccagtaaatccgtaataacttggctaaactacatacaaaaagcttaggaccccagcttgaaattgggattctaagctttttcgtttataggagagagtcggccagcaagtaccgaaaacttttattcaacagaagccccattggtcgcaatgacttctttgtaccaatagaaggatttcttacgtgagcgctccaagcttcccttgccttcgttgtcccggtcaacatagataaaaccgtagcgcttcttcatttctcctgtcccggcagagaccaggtcaatacatccccaagttgtatagccccagaggacaacgccatcttcgttaatggcatcccgcatggccttgatgtgagcagccaggtagtcaatccggtagtcatcctcaatctccccgtcttcatttggggtatcaacagcgcctagtccattttctacaataaacaggggtttttgataacgatcccagatggtgttcagcgtaatgcggagaccaagagggtcaatctgccaaccccattctgaactttctaggtaggggttcttcagagaggcaaagatattgcccgctgttttctccctttcagctggatcccctgaagcgactcgactggcatagtaggagaaggaaataaagtccactgtatggtctttcaacaattgcaggtcctgctccgtcatctcaaccgtgattccctgacgctcccactctttcttggcatagttagggtattccccacgcgcttgcacatcgatgaagaaatagttcttgcggtcttcttctagaccagcccagacatctcgtggagcacaggtatgcggatagttttgccctgctgctagcatacagcccaccttattgttaggatcaatctcatgggctagcttggtagcaatggctgaagcgaccaattcatggtgagccgcctggtatttgacctgctcctcattctccccttcttcaaagcagagacctgctcccataaaaggcgcatgaaggatcatattgatctcattaaaggttagccagtagttgaccaagcccttgtagcgagtgaagagggtccggcagagtcgttcataacattccaacatcttacgactacgccaacctccatactcggtaatcaaatgcatgggacagtcaaagtgggtaatggtcaccaagggttcaatgccatacttgtggcactccttaaagaggtcttcatagaactgtagacctgcttcattcggctctagttcatctcctttagggaagatccgagaccaggcaatggacaaacgataggttttaaagcccatttccccaaagagcgcaatgtcttccttgtagcgatggtacatatcaatgccatctttagctggataaaaatagccttcttcaaagtcgaacatctttttctgacccgtaataatggcgtgacgatcaggcccaatcggcaccacatccacattagccaagccacggccgtcttcattataagctccctcacactggttagcagccgtcgcaccaccccaaaggaaaccatctggaaattgaagtttgtcggtcatctctctacctcacttgatttgatagttctattatacccttctctttccaaaaaatcctacaagatcctatgaaaaactgatactattctaagattgtttttgttcacgcgcaacacaaaaagaccggataactccgatctttttaagttccactccaagaacgtttaaattttttgataatagaattacctagttcatacgataaaaatcaatcactaaaccagctgggcctttaactaacaggctttcggttccccaatcggttacaactggaccgtttaaaacctgtataccaagctctttcaaccgtttgtagttctggtctacatcctcaacctcgatatgaagaatgattcctgactgaaagttttccaaaggaaccaaatgattttgagacaacatgagacagtgactgccaatcgtgaactgagcaaaaccgtcatcggcatagtctgccttcttatccaaaatacgctccaagctagcacaaacttgggtaacatctgaaacgataatatctaattgatttaaattcatttcttatcctccacaaaaagaccggattgctccgatctttttaagttctgctctaagaaaatcaaagaataaacaaggcatcgaaccgcagacagtactggaatacagcaaggtgaagataacgcagtttacatttgattttccacgagaggaattatttgattgcgcgtgattgcaatccttcttcttccaagaagaggcggaatggtacgagttcttctgcttcgtatttttccttgaaggctttgatcgcttcttctgagtgttgttttggatccaactcaagaacttctactggaagtggacggtgttgcgtgatgcgagcatcgatgacaactgtcttaccttctttgttcaatttaacagcttcagcaacgactgcgtcgatgtcttcgatacggtcaactgtaaatccaatagctccttgagcttcagcgattttcgcatagtcagcattagggaagtcacaaccaaacaaatgtttgtttgtgtcttcgtatttgtccttgatgaaggcatatttaccatttgagaagacaacgttgataactggaaggtcgtattgaacgtttgtgataacgtctgggtagcacatgttgaatgcaccgtcacccatgatgttccatacttggcgatctggattgtctttcttagcagcgataccaccaggaagggcaatacccattgtcgcaaagagtggagatgtacgccacatgttcttaggtgtcatgtgaaggtgacgagtagatgtttgagtagtgtcaccgacgtcgattgaatagatagcgtcttgatcagcatgtttgttgattgcattgtaaacttgatacaattgcaattcaccctcagttttaccttcgagtttgttcatgtaatcacgccagttttggttattcttaacgtttgcacgccaccatggagtagattcaactggattcactttatcaaggattgctttggctgcttgacctgcatcaccaagaattgaagcgtctagggcatgacgtttaccaagtttgtaagggtcgatatcgacttggatgaatttttcagtgttcttgaaggcttcgtaaacttcagcaaatgggaagtttgaaccaaggaaaagaacagtgtctgcttcaaagaccacttcgttggctggtttccaaccaacacggtatgcagaacctgtcaaaccttcgtagttccattcgaaggcctcgaagtttttaccagttgtaatgattggtgctttaattttacgagacaattcagtgatcacatcacccgcaccaactccaccgaaaccagcgtagatcactgggcgttcagcattgttcaagatttcaacagctttatcgatttccacttcgttcaaggcaggagcgataaagtgacgttcataagaacctgatccgtagtaagagttttcgtcgatttcttggaaaccaaagtttactggaatttcaacaacggctggaccttttttagaaacggcagcacggcaagcttcatcgattacttttggcaattgttctgcgtaagctacacgtttgttgtaaacagcgataccgttgtacattgggttttggttcaattcttggaaggcatccatgttcagctcgttgtttggacgtgatccaagaatggcaaggaatggagtgttatccatagctgcatcgtaaacaccgttgatcaagtgagtcgcaccaggtccacctgaaccaactgcaaccccgatagagccaccaaatttagcttgcataaccgctgcaagagcaccagtttcttcgtgacgaacttgcaagaaacggatatctttgtcttcagccaaagcgtccataagtgagctaagtgttccagatgggataccgtagatcgtatctacgccccatgttttcaatacattaagcattgctgcagatgcagtaattttcccttgagtcattctaactctcctttaattctattttgatcccttaaaatgcagcatagcgcttctacttcatctttgcgatcatctcgccttgaaaatgagttttttctgacttttctcatgaaaacgatttacaaaacgattacagtattaatttatcacaaagagattcacatgtataaggatctgctcagagatgctcaatccctattccataacagatgctctttttgagaaattttcacaaactatcctacaatagggtattttactataatttgatacctcctcttttccctcgtcgctctaggtaaaagagaaaaagagtgatacagaattctgtaccacttcttattttcgttaatctattttcgcaacattgagaagcagcgagctagtcaaaacagacaaagaactaagggccatagcaagacctgctagttctggattgagggtcaatcccagtcctacaaagactccagcagcaattggaatcccaaggatattgtagatagaggcccagaagagattgagtaagatgcgacggaaggtcttttgactcatgtcaaaggcgcgcacaacgccaagcaaatcattttgcgtgagcacgatgccaccggactcgatcgcaatatccgttccagatcccatagcaattccgacatcggcgatcgaaagagctggagcatcattgatcccatctcccacaaaggctaccttactgctttcttgcagtttttggatggcgctagctttttcttgaggaaggacatcagcaatgacggtatcaatgcccacttgcttagcaatagcttgggccacccgttcattatcccctgttaacatgaccgttttcaagccccgttctttgagctttttgatcgcttcttttgagctggccttcggagcatcttgaatggcaatcaagccaatcacttgcccatccacagacaaactgatcactgttttggcctgctcttgcaactctaccatccgtttttcaagctccggatccatcaatgtcccgtcatgaagtttgccatttcccaaggtcaccaactgctggtcgatctgaccttggaccccttttccttcaatcgcttggaagttttccacaggggttagcaccaaacctttttcttctgctcgtgataagaccgcttgcgctaggggatgttctgaaaaagtttcaagactagcagccagtgtcaagacacgcgcttcatctcctacaacatcggttacaagtggttggccaatggtaatagtccctgtcttatcaaacacaacggtttgaatcttttgcacttcttgaagaactgttccatttttaatcagaacccccatcttggcactacggccggttccgaccatcagggcagtcggcgtcgccaaaccaagggcacaaggacaggcaataatgaggacagagactgcatagagcatggcctcttgaagcgacgcgcccagaagcacggaccaaacccagaaagtcgcaatggccaaaatcgtcaccactggaacaaagatacctgaaatcttatccgttaaatcttgaatgggagcacgactggattgggccattttgacaaagtccacaatttgagataagagggtctcactaccgactttttcagccttaaagagaatggtcccattgctgttgatagtggagccgataactgcatcaccaactgatttttccacaggcaagctttcacctgtcaccatcgactcatcaatggtcgtacttccttctacaatcgtcccatcaaccgcaatcttttccccaggacggacccgaatcaagtcatcaatttggatatcttctgccgccacctcgacatagttcccatcacggagaacttgagccgtttttgcctgcaaatccaacaacttttccacagcctcggaggcattgttacgcatccgttcttcaaagatttgccctaagaggataaagaagatgataaaacccgcagcctcaaagtatactggctgaccagtaaaaagggcaaatacactatagacataggctaccagggttccaagagctaccaaggtatccatattggaatggtgcttcttaaatgaggcccaggcactcttgataaaaggaactcctgccactagcataatcggcgttgtcgctagaaaagtcccccagcgactgactggatgggatacaaatcctgccatcatcccgatcatcaagatcaataagggaagggtaaagatactagtaatccaaaagcgacccagtaaacctaagacacgacggcgtttttccacaaccgtgtaggaacccttttgcatcttcattccacatgaaaactcgaagtcccctgtttctgtcggggtaaaagatatgaccttatccacaccgacttccaaaggctctaaaatcccctgatcttcaaacaaaatttccttgtaacagccggaaggattgacccgatggaaggtgatttcagcagggatccctttttgaagttgaaattcctttggactatagcctttttctgctgtaatacggatcttttgcactccgttttccacaactgctttttgtttttctaccatacctactcctttattccacaatcatgtgaccatgcatcatgttcattccacatgaatacccatattcgcccgctttttctggcgtaatttcaatgacatgtttttcacctaaaggcaaatcttcatgaacgccaaaatctggaaagatcacttgagccagacatgaagatggatccttgcgattaaagatgatccgggctggaacattctttttcaggacaatggtttcaggcgaatagccccccataacttcgacttcaatttcttgataacctgatttctgacgagcgtggccgcttaccttttcatgttctgcaaagaaccaccaagcaataaaagcaaccccaagtaaacaaacaatactaattaacaatccaaacattaaaattccttctttctattacatacaattgcaagggactgtttcgacagcctcagctttcttatcttcgaggacttgttgtagctgattaagatctgctagcgtaaagtcactcgcctgaatcaagttttcaagcacctggacaatcctttttgagcaaaccttgtctttcacatcctcaaccaccaagtctatactttggtcctgcgtcaacagagccgagtagacaaaggctttgccagatttttctctagtcaagcaccccttttcaaccaagcgcgtcaagagggttttgatcgtcgacttggaccagtcaaagcgctcggacaagacggcgatcaaatccgtgctggtctgcttgccttccatccagataatcttcatgatgcgccattctgcattggaaatttgcatggcctctcctttcaaaatctacatttgtaaatcttatgatgttattttactcctaagatttacatttgtcaaccttaaaaaataaaaaaatttcctcttggaaataggggaaggtagacaatctgtttttacaaaaaatcatctaaagagctctaaaaataaatagaaaaaatttcaattataagaaccatcaaagcatctattgaaactttccgctgtgagaaaagtgcctgaaacaattatgtttcaggcacacgggagttttggaaccttaggtccaaaactaagtcatggaacttctacgaagttcgctgacgtccgtaactcacctaaggaaagtttctaagaggactttatcttcaatctgaaagcttcctttgaagatttgtctgattgggctttttttcgctccctatttttgtctctataacgtctcctgcagagcttgagctaggatgcggtaaccagccacacttagatggaggccatctgtcgtataggcttctgctaactgcccaacttcatccaataaagacgaatacacgtcgacatagctgacctggtggtaggcttgggccaattcttgataggcctgattgagggcctgaattttttcattggtccggacatagaccttttgtttgtagcgctcttcttgactcaccggtaaaaccgagatcaggttgatgtgagttaggggaaaatcccgcataatcgcttgtaagaccgcttctacattgtctaaggtttccttttgaggaatttcttttccgatatcattggtcccgatcaagagaaagatctgatccaccgccgttccaaaaacatgggcgtctagatgctgacgaaggagatccgtcttatagcctcgtactcctcgattgaccatgtgttttggactttgtaatagttcatgaatggggaaatactctacgatagagtccccgacaaagatcaaaccaggctccttcagaggctcttgattgagctcccgataggttgttatgactttctcctgctcctttaagagccagtcttctaacagttgtaccgccatctacttctttcctttcacttgttcccagggggtcaatcctagatactcttcgatcacttggtagacaccgccttcttgatggctcggtgctaggtgtttggcaacagccttgacagcttcttctgcattagccaccgcataggagtgagcagccatttcaagcatttcgatgtcgtttccactatccccaaaggccatgacctggctagcattaagctgccacatctccattaattgagccagtccccaagccttgtgaatacctgcttgtaagagatccatgctcccaaaaccgctcgaaaccgccatgagctgatctccaaaagcctgttggacttcctgactcacttgatcaagacgatccaagccaaccaccaagctcattttaagcacctggtcaaacaaatcggctgtcaattccggaacaaacttcattcgcttgtacaaggcttcaatcacttccggctgcatgaatttctcaacctctgtaaagaccgttccttccttgacaaagccaccattgacagctgagacaaccagctggtctgaaatttcccgccccttaaaataagcaagaaccgcctctactagttctcgatcccagaatttcccaagaatcatctggtcatcctcaaaaatccgtgctccattggctacgaccagagtcacccgcttgaccaaaggacccaagagctggcgcatgcgatggatttcatttcccgtcgcaatgacaaagcgaatccctttttgatccaagtggtccaatagcctttccagacgcggaagatccatctctcctcgctcatctaataaggttccatccatatctgtagcaatcaacttaatcatacaatctaaccttttccctttcaaagggtgtaaattatctggttccattataccacagatcaagcaagtcaaaaccacccgtgaaaacaggtggcttcctcttgggctgaaggttgttactgatggccaaaggatcttataaatacaagcccttttctacactttcctgaaccaactcttctgtcagtttccacaactctttggactcactttttataaaatttttcttttctaataccatctctgaacggatatgatcaggattataattgacttctgacacttccaagtgattgatcagtggtaccaatgcgtcaatcactcttgcatatcttgcctcaggactctgccctttttcaaactccaaccacgattttttcatattcaaatatgttgcttctggaaggaggctcattgttttttctatagattctagctctctatcatgagcatgaagctttttttcatcatcaaacacccaagtatctccagcataaatctcacctaaatcatggatcagtaacagaaacatgaccttttccatattcaatttttcaggataataatcctgaagaaccatcgcagctatcgcaccctgccaggaatgctcggcactattttcaaaccgtccatcaagggttctattaaaccttgttactgactttaatttctcgatttctttaataaatgcaactgtctgattcaaatcactcatggcgactccaacctccctattcgaaattacgactatcataccagaaatcagggtttccataaatgaattcccatatttgcaaaaagaaaatatccccctttttgggagtaccttcatttttctaacaagactacaaggacaagcaaaaaagctaacctatatttgccggttagcttctatttttcacccaacaaaggcccaaataatagcaatcagcactgctggcaggagattggcaaccttgattcgtttgccccagatgaggttgatccccacacaaagaataaggctggagccaaccagtgagagattggacagggcttgtggggtcatgattggtgcgatcaaatgagccaaaagtgtgatcaagccctgaaggatcacgagtggtactaccgcaaagatcgcaccctttcctttcgaaactgtcaaaactaaaacgatgaccatatccagaatagccttagccaacaaggtcgaagtgtcacctgtcaagccatcctggacagctccgaccaccgccatagctccgatacagatggtcagggccgtggtcataaaggcatcgacaaagctggtatcaccttgattgcccgtcttttccttcagccatgtcccgaggtgctccaagccctcttcaatcttcaaaagctctccaagcaccgtcccaagcactagactcagaatcaacatcatactgccgtgactttccacatgacttccatgcaccaccagcatcttttccaaggtccccgcgatgcccaagacaaagacagcaactcctgtcactttcagaagagtctcatgaaaatcttctgataaacgttgaccaatgagcagtcctaaaagcccaccaaatacgacccctaaggcattatagaaggtccctaaaccgatcatttacaaactccttcgttcattttcattctttttcaatttctttcaaagaccagcgtcccttctcttcatactggtcaatcaagtccttggctgtttgcgtgatctcctctggataatgtaggctttctagggtattgaccgcatttttggtcacggctgaccctggcttgatctggtagtcaaagacaatcttgccctccacatagcggctgtcaaaatggtaattgtcattgacctcaccagaggctgcgaccagctcaatatcatggctggaaatcatgtagaggcagttttgggtagctaaccagcggacaatcccaagacctgatccgatccgctcgatggtattggtccccttaaagagctcgtcaataaagaagtagtgaaagccaggcttcttcagatgctgaatcatacgtaaaatagctttactttcggtgatgaagtaactatctccaacttcaatgtcatcgctcacatccatagccgttagcacatgaccatagggaagggctaatttttctccataggcaaagcctaacccttgagccagaatggcattgatggcgacagttttcaggtaggtcgatttcccggaggcattgtccccactgatgaccatatttttctgaaaatgcacatcattcgcaatcggattggacagcaagggatggtagagcgtctcaccttcaatcccacccgtctctgtaaagactggctgacagaccacttctagatcccgcttgtggcgcaagaggctaatagcgacttccatctctccaaggagatccagaagtttctgggcctctttttgatgagccttcacctgattgtaaatataaacctgagcgatctgcgggagtaaaaagagaacgttgaggtagaggagaataatttccatctcagaggtccccgttggactctgcaagacactggcaaggatccgcgttttcttaaagggtttgaccgcttgcttcagttcttcttgttgtggcaaggccagatggctcaagcgttctgccgaagcaaagatgcgaaccagatagctgacattgtccaaacgaattttattggaccaattgcgcaaactcgaaaagacaatattaaagaccacactgataaccaagagggtaatggcaccgactggctcaaaggggatggcaaagagacagacaatgggaaggcaggccaaggctagatagaggggcaaacctgcataatgcttgccgggatttgcgacaatgctccgcgccatgttgtggttcttcttgcccagttggttgaaaatgacctggaccttgaggcgcaaatcaggatgctcttcaaagaaggcttctaaatcatgaagctggttctgaggctggaattccagcaggcgcattttttgatagagagcctctgctccaaggctcgattgggtatagttgagctgatcaaagaccgcatccaaagccaaatcatgccaggtctgatcatccacttggctatcgatcgtccttcccttagctggataagtcagactatctatcaaactttcttctgtgtctttcttgcgaaagaaaggcgccccatcccaagccttcttcagcttttgcttgaggcggatggctgtaagaaatttggttgcccaaatcaccactatcaatcctaggatcccaagcgggatccagttcacatttccttccatgctctattcctttccactctgaggccagtccaagtgaacatgttccttcatttctcggtaggccgtgtccactctctccttggtctcctcatccagcttgtcgcggtatttgccaccctggataaaatcttccaaaatataggtctggtacttgtacaagtcatagccttcaggagaataggttcctttcggagtccgactgacccaggttggatgagcagtagccgtcttaatccgtgtcttgcgaccaaccttttcgatggtcacatccatcaagacccctcgctctgtccattgggcagtctccacatcccccatcgtttccagacgctgattggaaaggaaattccccatcgagtagatgatgagcttgttttgaccatctttattgaccacttcagcaggctctacaacatggggatgcccgccaaagacgatatcagctccccaagaaaccatcttgtgatagagctctttttgctcttctgtcggctccaactggtactcgattcccatctgaggcatgacaatagtaatatctgcctcttgctctgccttttggatctccgccttcatccgctcttcatccagatcagacaaaacatctgcttgctcttctggagtaagggtcgtttccattccattaaaaccgtaagcgtaggctagaatagcaatcttgatgccattcacttccttgatcactaagggggcctggcctctcttttcatgcgtgtaaacaccgacaggggtgatgcctgcatcttcaaaggccttggctgtcgaatagaccccttctaggcctgaatccaggatgtggttgtgtcccaaatccatgacatcataaccagcatccttgatggctggtacgacttcgctcggcgcattaaagaggggataacctgacaaatagtaattggggtcaatggttccctcaaaatcgcccaagaccagatccgccttttgtagccagggtttgacatacacataattttcatgaaaatcatagcttccatcttctttttgcgcgctcatataaagcaaatcatggtagagctggtctccattagccatgatccgcgctgtatgaggaatctgatcagccggtgtttttgccttgtacacaacctctggccgttcggttgcggtaatcggaaagccttgaaacttttgcacccacaagatggcattggccacgatgaaaacaacagacaagagcacatagacaaactgttcattggtcagccgaatctttgaaaagagacgatcaaaagcccagtcaaaggctgccgatagctcttttcccatcgttttgatggtccctttcacattctcccacttctctaacattcctaccccttcttcgtatctaatttctccaatgatccgccaacagattgagctgtcattgaaatactttctcttcattgtatcacaatttttaagaagagaaaaaagagagcaggacagaagcgccattgtttagaaccgcttcatcgtcctgctcctgcacagttgattaattcatgtaaatgatcgatcatcacttcttatcgtttgatttggacaagctaatcgcaaccatgacaagacttaggaaaaaggccgaaagcaacccttttgtcgtccgattcataaaaggttgatggaatacaaaatgattataggcagtaaatcctaatccaatcagagttaccatagccgaaagtgaaaaaattgttaaccacaaatttctatttttcatcataaactccgtttttcgatctactagaaaggccctcttatttcaaagcctttaacaaatatccataaccttcttgttccatctcctcttttggaataaagcgcaaagaggccgaattgatgcaatagcgaaggccaccctggtcttttggtccatcggtgaagacatggccgagatgggcattgcctgagcgggatcgaacttcgatccgctccatcccgtggctatgatcttggtaatagtggacaacatctttggcaataggacgagagaaacttggccatccacagccagatgcaaacttatccttggcaaagaagagaggctcccccgtcgtaatatccacataaatcccctcttcaaaggtctgatcataggcattgtggaaaggacgttccgtcgcactttcttgggtgacttggtactgttctgctgtcagtttcgcctttaggatttcttgatctggcttctgataggctgctggatcaatcaagggttgggctgcatctgtcacatcgatatggcaatagcctccaggattcttcttaaggtagtcttggtggtagtcctcagctaggatgtagtggcgcaaaggttctagttcaaccgctattttactgcccagttgcttctccacttccgcaagcacttgggcaatcacctcacgatctgcctcgtctgtataatagacgccggtccgatattggcggcctcgatcatttccctgcttgttaatggacaagggatcgatcacacggaaatagtagagcagaatcgctcgtagggtaattttatctggatcgtagatgacctgaacggtttctgcatgatccgtttccttgatcagttggtaattggtcgtttctacctggccattggcatagcccaccgtcgtctcttctacaccggggatccgtgaaaaatattcctctaagccccaaaaacagccacctgctagataaatctctgccatcttttttcctcgcttcctgcattccccacatggaacgcttgacatctattagctccatcataatccaagagcctcagattttcaaggattctgcatcaaaaatcccttctactatatgtaaaagggattcaatccttcttatttttcaaataagaaaaagagcgagtaatagaaattccaaaacgatagggttaactgatgtagaaaatcatgaaggactaccatgaccaacacctcctccgaatatctgtggacaaactcaaggcacatcaactacaaaaccaccgtcggtccatagacctgtaactgaggcttcacaacctcgtaatgccagtgatcataagctcgccaagcttgaaaggcttcttcgttcaatgctagcccgcccagaccaatcaatagactggcggtctgataaaacttttctaactcaatcaacagacgattgtctacccgcctagcctttcgtaaacctttcaacatctgatctagattttctcgaaatcgaagggcatctggactgggggggaatcctttagaaaaggctgtttgaagaaggatgatcgtcgtccttgcctcttgaatcacgtccctttcttccatataaatcaccttccttttcacctccattgtacacctttttctctctataaaaatggataattcctaaaactaggaacagaatgaggttggtacaaaagtcctagcctctcaattatttttggattgtcgagcaagacgcagtggttgagtgggctctactacgctgatttcatcagcttttacagccctactcaactgtgcggaggtgggacgacgaaattgaattctaacgaattaccgatttctgtcccactctcataaaaaacttccccaagtttccacttgaggaagttcttttcgaaagattagtcaatgtagtgcaatttcccacggaagtcttccaggctttggtagcctttttcttccatgatggctttgagctccgcagtgatgcggtcaaaagctcctactccttctttatggagtgtcgttccaatttgcaccatactagccccacaaagaatatgctcaaaagcatcgcgaccagtcaagacgcccccggtccccacaatctgaatttctggattcagacgttggtaaaaggcatggacattggcgagagccgttggtttgatgtattctccaccaatcccaccaaaaccgttcttaggacgaatcaccacggattcatcctcaatgtagaggccatttccgattgagttgacgcaattgacaaacttgagcgggtatttgttaaagatcgctgctgcttgatcaaaatgaacgatatcaaaataaggtggcaatttgatgcctagaggtttggtgaaataggcaaagacctcagacaagatccgatctgtcgtatcaaaatcataggcgatctgaggtttcccagggacattgggacaagataagttcaactctgtcaagcctttaaagtcactatcttgcacctttttcaagatggtatgagtttcttcaggagacatgccgacgagagataagaagaaggtccgatctggatccgtttcttgcaactccaataagtaattcaaataatagttcaacccttggttaggtagccccatcgaattgatcgaaccaagcggcacatcttggtagcgtggctctggattaccagcacggaattctaaggtcgctgtcttggtcacaaaggttcccgcagctgagttcttcacttcttctaattcctcagttgtcatacaggctacacctgccgcattcatcaagcagttgtcaaattcaaaaccagcaatttgcgtctttgtcgataccatcttgtactccttttttgaaacaccaccaacagaattgttcgggatgctctctattttcttctttcattataccatcacttggaagcttccggacaatcaaagctaaaaattcttccaaatattcggactttcctagtcacgataaaattttcagaaaattcaacttttttctttacaagccaaaaaaagtctgctataatgatccatgtaataaaacatgacattgtttgtcaactgtctcaaagccactcccctagcgggtttgctggttttcgtttcattcacaaaggagaattaacatgacaactgctaaagaatatatccaaagcactttcgaaactgtaaaagctcgtaacggccacgaagctgaattccttcaagctgttgaagagttcctcagcactttggaacctgtttttgaaaaacatcctgaatacatcgaagaaaacattttggctcgtattacagaacctgaacgcgtgatttccttccgtgttccttgggttgaccgtgaaggaaacatccaagtaaaccgtggttaccgtgttcaattcaactctgctgtaggtccttacaaaggtggtcttcgtttccacccaactgttaaccaagggatcttgaaattcctcggtttcgaacaaatcttcaaaaacgtcttgactggtcttcctatcggtggtggtaaaggtggatctgacttcgatcctaaaggaaaaacagacgctgaagtaatgcgtttctgccaaagcttcatgactgaattgcaaaaacacatcggtccttctcttgatgttccagctggtgatatcggggttggtggacgtgaaatcggatacctttatggtcaatacaaacgccttcgccaatttgatgctggtgtcttgactggtaaacctcttggtttcggtggtagcttgatccgtccagaagcaactggttacggtttggtttactacactgaagaaatgctcaaggccaacggcgacagctttgctggtaagaaagtcgtgatctcaggttctggtaacgttgctcaatacgctcttcaaaaagcaactgaacttggtgcaactgttatctctgtatctgactcaaacggttacgtgatcgacgaaaacggtattgacttcgaccttcttacagacgtcaaagaaaaacgtcgtgcacgtttgactgaatacgctgctgaaaaaccaactgctacttactacgaaggttctgtatggacttatgctggtaactatgacatcgctcttccatgtgcaactcaaaacgaaatcgatggcgatgctgcaaaacgtttggtcgctcaaggtgtgaaagttgtctctgaaggagcaaacatgccaagtaacatcgatgccatcaacgtatacaaagaaaatggtatcctttacggacctgctaaagcagccaatgctggtggggttgctgtatctgctcttgaaatgagccaaaacagccaacgtctttcatggacacgcgaagaagtggacggacgtttgaaagacatcatgaccaacatcttcaacactgctaaaacaactgcagaaacttacggtcttggtaaagattaccttgcaggtgccaacatcgctgcctttgaaaatgtcgcaaatgcgatgattgcacaaggtcttgtataatcaatcgatatttttctttgagaccttcgggtcaaagcctctcaactcctgaaaccagtatgtttcaggagttttttttgtagttacagacctctgtcaagacaccccgtcccaagtgaggaaagccattttttagataagggactcgaccgtctctagtggggagaagtgatccctctctttttctgtatctttttctaaaaaaattttattttttttactttacccccttgcatttttaataaattagtattaaactatagcaaaaggaggtgtgcttatgtttcttttagctcaagaaaaatcagatacgatcgaattccttaagtctgaattggtccaattactctacaatatgcgacaagaaatcgcagctagccgtcaatcacagaccggcgcagcttgtcatcatattgaatattgcatggacaagatccaaagggcaaaaagttccgtagccattgccctcccgatcgaatccttaaatcttgaaatcacgactatgttgcgccagcaactcatcgtcttgccaccagaggctcgaaaaaattgggaccagattaaaaagctggatttcaaatactgccacttaaaatagaccaaaaaagagagtgggacagaaatcggtaattcgttagaattcgatttcgtcgtcccacctccgcacagttgagtagggctgtaaaagctgatgaaatcagcgtagtagagcccactcaaccactgcgtcttgctcgacaatccaaaaataattgagaggctaggacttttgtcccagcctcttttttgtgttaaacaaagtataaatttctaattatctttttatattttcttaaatgctcgtaaagccttattctatgtgctttcgagtatttttactgtaggaagatacttcacgtttctttgcatatttcctcatgtcttagctgtcagaagtggtaaataagtagtaaattcatttgtactactaagcaacaagacgctcctgttgcttctctttattcaagcgtttcatttctgccattgcagaatcgaatgttgcatgtgcgtaatagttcagcgtcatggctatattagcatgtcccataatgtactgtaatgcctttggattcattcctgcatttgcatagttggtacagaatgtatgtcgcaaactatgtggagtgatgtgtggcaatttatcctcgttatacttattgtatttcttaacaagacctttcatcatgccgttgtaatcacttgccacttttggatagttctttctattaagaaagaggaaatcactatatccatcaatctcaacacgcttatcattctttcgattcgctaacactcgcttaaatgcttgataggcttcttcaaccataggaacttgacgttcgccacttttggtctttggtgtttcaatgtagtacccaatttcagtatctctcaatagctgatggtctatattgacaagacgattctcaaaatctaaatctggaagtgtcaaaccaccaaactctgaaatacgaagacctgtttttaagagtatcagaatttcatcataatttttgctgtaggttttatcagcttttgcaaaggctaacagtttttcttcctgttcttctgttagtacggtcttagggacagtatcatcatcaagaactgctttcagttgaaagtcaaatggattcttccgaacacaatcatcttgtatagcaatatagaatgaagcctttaaagaacgtttgtagttattgatggtttgataagcataaccattttcactcattctaatagcccattctttagcgtctgatggcttaatactgtcaatacttcttacacctaacttgtctttcttcaaaatatccataagatatttgcgtccagtttcagtgttttttctaacctttggtctttgagcgttctgttttgcgtaaagctggcagagtgtcattttctttcctacaacatcaataccatcatgaatgtctttctgtaactctgcgattttctctctaagtgagatacaatcacgctttcctgctggtactcggtctgtagccacaagtttccacgagtaaacaaattgcggttctccaaatgaatctatatatttgtataagtatcttccgtcttttcgttggctctctccagtctttaagattcgacctttattgtcacgtcttttttctgacatggcatttgctcctttcctttatggaaagagccttgatacgacttaatactattttatcatatacaagaccctttggcgacgctagattgcgtccaatgtatctataattttttcaaattgttttcgtttaatctgaatacgattgccattcataatcagccaatttgcatttttattttcctctgccaagcgtcgtagcttgttttcgccaatacgaaaatattttgacgcttcttcaatggttagggtataacgttcccaaataggaatgtcagtctgcttcataaaatcctcctttccaaatcacttatttggatttcataaaagttgttttaccagcaatcgaacagctttagcaaagctcacgggagttccacccctgcatggttctcatgtagccatactcattgcctgcgacggttttatcacgctcggactattgactgtatgggagtatcattatcacgataagaatgtcgttgcaggcaatcctgctaaagattgcttctcggatcactaacatgaatcgctcgctatctttataagataggtcatggcggttagttccgttggctcttttcttatcgaaacgtattcgattacttttattcagttttcaaagaacaatggctcgttagcctatcaaaacacattgaaagctcaatatgctttggtggaataacaaacctccctgttcgggaagcgtggaatggtttagcacgcttccacgaaaggagagaggatattacttaatttcaaatgacaaaatctttgtaatcagtctggtttccattcttccacgtaagacttcatcaacgaccatactttgattgccatattcatctttcataagtcgtagggaacgcttcgttatgtaccctctgtaatgatgtagaatctggttaatcgcttcggtatcgccatctgttgcctttacaatgagaggaaagggaatcataggatattgtgttttcattcttcaaattcctccataaactttttaattaaggctagtccactggttctatgccgatagacagtagaacggttcaatttcaacaggtctgcaatttctgaatcgctcatgtccataaagtaaaacagcagtagaatttcacgtttcttgtctggcaactcacgtaatgcttcactcaacaaatcattttcaacgcctactgataacccattgagtgtaaaaatctgaaagtcagttgaatagttatctgttgtcgcaaactggctaacaagataatcgccaacatccgaaaaggacacctcacgctttgcaatccttgaaagataaagcatataattctttcgctcgtcttccatagcacgtttacagatatagtcaaactgattttctattgtggtctgaaaagaagatggtttcatgtttctcaccccctttctgtctaggaaaggaagtgagccttgctcgtttatctcctttcactcttagtcccaatgtgaaagggggatttgttgcattactgataaataaactttgtaaaaaagttctgaatagccaaaaaagcatataaacagatttatttctctgtttacatgcttctgttattctatctatatgatttataaaaccacattggtggacgtacttatctattgcagatagacgactttttttgacaagaacccaatgtaaggaaatttattgtatatgatgtacttcatggcgacgttgacctccaacaaaccgccatttggaagtaatatacaatattttaacagcgtaaatagcactaccatataacggttttttttattggcgtttagtagtgctttttattaaatataaacctataaaccatataacacgtttttctatacctgtttttaattcagtaggaacaataaaatgtatagaggtggtctactatgcgtaaaaaagaagataaatatgattttagagcctttggtttagccattaaagaagctcgattgaaacgaggtttaactcgtgaacaagtgggagcattgattgaaattgacccacggtacttaactaatattgaaaataaagggcaacaccccagcatacaagttctttatgaccttgtatcgttacttcatgtttccgttgatgaatttttcttacctggggtcccgagcgcttagtgggaatttgtatcgataaggggtacaaattcccactaaaccaatgtttcaaggcctatttattttttatattcaattctcttaagtgtttaggaatagataacaagtcaaatttatactctccaagaaaagtgatatgctcccaattaataggagatacatgcttcatatacttagttacttcgggatctattttgacgagataattataagctgcttgtaagtagacggcgttccatatacttattgcatttattaacacattaagcgcactagcactttgaagttgtcggcgaatatcgcgctccataaattttccgcgtcgcccaaaaaatagttctctagctaaagcattaatcgcttctgtcttatttagtccatgagtgatccttcgccgtagctcactatctgtaatataatctatcataaaaatgctcttttcaatgcgacctagttctctcagtgcaagagctactctattcttacgtgcgtatgagcctagctttcctaatagtaaagaactagatacttttcctgtttgaatcgaataggcgattcgtttaatttcatcatagttttcttcaataatttttacattgatttttccgcttatatcttctgataagttagggtagtaggaaggtgatttgatagaaaataattgtgatttttttatatttctgatgcgaggttcaaaatcaaagcctagtaatgcggtcattccaaacacctgatcagaatacccatttgtatcagtaaaatgttcctcaatatctagatctgtttcatgataaagtaggccatcaagggtatgagtagcttcccttgtattagttgaagcaacctcgatatgatgagtcgtatgcctatcatttattgatcgaatcattgtagctcctttttccatacttttgtaatgtggattaacatcggattttagagctgagacgcccactgggacgcgcattccgtctgaagcagtggtttttccttcaccccaaaagtctgcaacaggaagctttaactgataattaaccaaaacagattgagcacgagtcagagcttctttataaaagcgccattgtttggcattggctaactgagaataagaaattccaggagttgattgggccattttttcaagaccaatattcatccctaaacccagcaaagcagcaaaaataatttttctttcttgttcactcggcggtttccctgtagaatcatgactaaattcttgtgaaaagttggtccaactgtccacctcaattaaaagatcactaagccttatcttaggaattattgaataaagtttttttctatatatttctgcttcgctaggtgtaactttttccaactttttaaggtttgctcttgaaattctcttatcaactgtcgaataaaattgaagctgtaaatctaaaattatttcccgatcctttaaatagtcctcaaacgtgtctggaatagtttctgaatcaatacaagcagataaatcaactaagtaatcatcaatatttcgatggatcatacttccttcaactgaaatatctcctgatcgaatattgttctttagctcggtgaaagctactaactcatagtaagaccgatctattttcccctcttctggccgaacaaggcttttccattttttactcacaaaatcagtagaagtatctgccggtatttttcttttaccactattgtgtaaatcagttagttgagttagggccatgaggactggatttgctgccggagttgctttgaacgaaagggtcctcaataacattggcgtgtatcttcggaggtaattagctttatttcgaaccatttctaaatagccatgatttttattacctgtaatttttttagcttcttctccatcttgtactaaatcttcccaaggcatgattcgttcaatttcgtcaaaaggattactatcattatcttttgcaaagtgaagagcatcaattaaagaagcataatgttccaattttttagtagccaattttcctttttcttttaactgttcttgtgaatcacgtgtccctttgcgtttaatacttgctaaaatgcggtcattaatctcaatcagttgatcgatcagatattgatgatgattgactaaaaaagcaataagtaaagagtatcttttttcaagctcaaaacgggagaagtcatatgcatcataattttcccctagtctagctagctgaagaaacctgttccgattaatatgggagacattaattgtcccgagtcccatggaagcaatcacttccacttttttacaaatactcataaagctttctggatttgccttacctggaatgtcttttagccaagcgagtttagttattttcgtctcttcataaatttgaaacaaactctctagtttttcaatttgtatatctgttaatgaacagagtaatattgaaaataagttgttttctgctttatctcgacagcggcttataatgtcttcaagtgtagctatagatggaaaaataattctttttcgagttaagaaatcaattgtttttttcattagatagatagagtcatcattttctaaagctagttcaattaaatattctattaactgtttttgtgtattagcactaccgaatcgatgatagttgaatacttctaagatctcgttgaagtgatttgcacgtgtatttctatgatcatatgaatttaaatcaattgcatcaagatggagctgtcgactcacataagaagttagtctggttgatttaatcggccaattacttaaagaacacccaggataccgggccaaacaaagttgtatcgcaaatcctagtttattgacctttccacggtgttgattaataacctccagatcataatcagaaaaactaaaatacgctttaaaatcctcttctgataagtggtctacagaaagaagttgttcacgctgtgaagtagttaaaattcttttcatagccatatcttaagcattccttttattgaggtaacggtaaaaggttgttttgcttaatttagaggcatcaagaatttgacgaatagaatactctttgctgtcatacatttttaaagctaaatcaattgatagcttacctttacttggacggccccctttttttcctcggactctggctgccttaagaccagagttagttcgttcaataataatatcccgttccagttctgctaaactagccataactcggaaaaagaatcttcccatagacgttgaagtatctacgttatcttgaatagatataaaaatgacactaagttcttcaaataattcagaaagttcaatcaaatgtttagttgatcgtgaaattcgatctaacttgtaaatgacaacagaatctccttcacgtagtaggttgatcatttcttctaattgcggtcggtcttttttcgcaccagttactttttcttgaaataatttatcaattccataatgagtaagtgcatcaatttgtaaactaagattttgatcatccgtactcactcgagcatagccaaaaatcataaaaaaacctccttaattttataatttaaatgtaccataactcattaagtataactatataggaactatgaaaaaggaacggattttggtacttgatttacttaaaaaacatttagaaaaagcaggaaaatgaaaaggtaccataaacggtcgtttatggtaccattcaaatttatccttattgtacaaaataacagcgaaatttttaaatctattccttatcgatacaaattccccgtaggcgctagggacctctttagctccttggaagctgtcagtagtatacctaataatttatctacattccctttagtaacgtgtaactttccaaatttacaaaagcgactcatagaattatttcctcccgttaaataatagataactattaaaaatagacaatacttgctcataagtaacggtacttaaattgtttactttggcgtgtttcattgcttgatgaaactgatttttagtaaacagttgacgatattctcgattgacccattttgaaacaaagtacgtatatagcttccaatatttatctggaacatctgtggtatggcgggtaagttttattaagacactgtttacttttggtttaggatgaaagcattccgctggcagcttaagcaattgctgaatcgagacttgagtgtgcaagagcaaccctagtgttcggtgaatatccaaggtacgcttgtagaatccttcttcaacaatcagatagatgtcagacgcatggctttcaaaaaccacttttttaataatttgtgtgcttaaatggtaaggaatattcccaacaattttatacctctgtttgttagggaattgaaactgtagaatatcttggtgaattaaagtgacacgaatgttcagttttaatttttctgacgataagttgaatagatgactgtctaattcaatagacgttacctgtttacttattttagccagtttcgtcgttaaatgccctttacctgttccaatttcgtaaacggtatcggtttcttttaaattcaattgttttattatttggttgagtactttttcactcgttaaaaagttttgagaatattttatatttttgttcatgtaatcactcctgaagtgattacatctataaataaatacagaagttaaacgatttgtttgtaattttagttatctgtttaaaaagtcataagattagtcactggtaggaattaatctaacgtatttatttatctgcgtaatcactgtttttagtctgtttcaaaacagtagatgttttatctacattacgcatttggaataccaacatgacgaatccctccttcttaattacaaatttttagcatctaatttaacttcaattcctattatacaaaattttaagataatgcacaatcaacacactcttaagtttgcttctaagtcttatttccataactttagggttaaccatacgcaagaccaatcactctcggacaatactcatgattttaatgataaaatccatgttaaacccatagataagaaatacacctgcaataaccgttacctgtttgtgccaatttaaaaatgcaccacttttttataattaaaacggttgaaaactgtaccactaataactcacaatagagagatgtcaccgtcaagttaaatgtacaaaataacagcgaaatttttaaatctatttcttatcgatacaaattcctcgtaggcgctcgggacccctacctgctaataacttggtaaaaagcacccgacgattacagatagagaaatacatggatagctttacagacaaagaactatccttaatggaatctttagccagcggtatcaacgaagcaagaaacatcgaagactaattaaaagaatccatacataacggaaagagccgataaaatgagattgtattaatctcattttatcggctctgcgtctttgcgtctggctctgtaatcacagttactttgaactgctttatttcaattaaattttcttgtctgcatttcggacaatagagggggaatttttttaattcagtatcttcccttatctttaatcgtgttttatttccacatacaggacacaatatccacttgtagtttataataactatctcctcctttacactttaattcaaatctttattaaaaaatatttcatcttatttaacaagaaaccatatttatataacaacataaaatacactaagttattttattgaacatatatcgtactttatctatccgactatttggacgacggggctggcaaacaggttcaccggtagtaacatggtacccttttaactctgttaaacaaacactacgtccatttgtaaagaaagttaaatcactacgatattcttgaatacaccgagcagggatttctccactaagaatgacctcattatttttcaattgagtgtctacgatgttcgcacaatatttaggagcatcgttgtatgctcgtgaaagatattcctgtggcgcataaattttaaaactaagatatggctctaacaattctgttccagctttttttaagacttgttccaatacaataggagcaagcatccgaaaatctgctggagtactaacagggctatagtataaaccgtacttaaaacagattttacaatccgtcacattccaaccatataatccttgttcgcaaccatagcgtatcccttccataactgcattttgaaatgattgatttaagtatccaagagaaaccgagctctcatactgcattccacttcccaacggaagcggtgatacagataaaccaatggaagcccagaaaggatttggcggcacttcgatgtgaatggtatattctgcattttttaacggtctctccatataaatgactgtaggctcttttagttctatctccacatgatacttttcttgcaacagtgcactaatcacttccatttgtactttccctaagaaagaaagtataatttcatgtgtcgtagaatccacgtaatatcgtagaagcggatcactatctgagatttccaaaagggcatcaagcaacatttctctctgttcaggtttactcggttcaacagttgtttgtagtagagggtgcggattttcaatcttttttctctgtggcaatagttttgtatctccaagaacactatttaacttcaaaaactcattttgcaaaataacaatttctccagaataagctctatcaatcttacataattcaccatttattgaagtatacatttctgtaacttttattttttctttttctgatactctaaccgaatctcgtaaatgtagtactccactataaaggcgtatatatgcaagacgttgtcttttttttgtatattcaattttgaaaacatttccgcaaagttcagacggacctcgatgtgttgatgaataaaatttattagtaataacttctataaggttatcaatccctatattactttttgcacttccatgataaagagggaacagagaacaattctgaaatcttatgctttcctcttgttcgagttccaatgcttctaatgatttaccggacatatatttctctaaaaggtcatcgtttccctctattaccgtatcccattgttcagattcggtaaagttcgtcacacacatattaggatacagttctaccttctgtttgattacaatttcggcagaaagtttctctttaatatcctgataaaccgttgataaatcaattccattttggtcaatcttattgataaaaaagattgtgggaatccccattttcctaagtgcatgaaataatatacgagtttgtgcttgtacgccatcttttgcagaaatcagtagaattgccccatctaaaactgataatgaacgatatacttctgctaagaaatccatatgtcctggcgtgtctatgatgttcaccttcgtattttcccactgaaaagaggttattcctgtctgaattgtaattcctctctgacgttctaaaagcgtattatccgtcctcgttgtacctttgtccacgcttcctaattctgtaatcgctccactgttatataataagctttctgttaaggtagtttttcctgcatcaacatgagctaaaactccaatattaataattttcatgtgattttcctccattcaaaaacccaaaagggcataaaaatcccagtgataaatacttttatcactgggatttttatgcataaccataggtatacaaagcatacagatattctctggatactttagaatcacatgataaaggtattcttaaactgggtacaaaaaactaagccctcctaaaaaaggacatccaattatttgttcccactatcaaattgacagtttatttaagaataccttgccgcatatttattaactccttttaaatagatacttaaataatagcacgtaagagcatatttgtaaaggaatctccaattttttatcaaagagagtacgtgattacaaaatagctgtaataatgtaccaatatttgttattctataatcttccaattactcccgttcttttcaagtaccaaatcaaattgagatacctgcgttgctttggtctgctggtcgatatactccactgtcagcgataccgtgacttgattatccttacgattgtgaataggatttaccagttcttgaaagatgtactcttttccgattggttttaatatcccgtcattcacatagtaggaaagttcactggctgtcgctgtaggatagagcttgaagaacgtcgttaaaaactcattgatttcattggttgtaatggaatcaaccgtcccctcactttcaatggcttttggtttataacttgatttcttaggtatgttggtaatggtcggattcttaaccagtaccatatttccagaaccatctacatagacactcactatataagcagagtggacggtctttgtattttctccctctgtaatgagctggtctacactgtaggttacattaaactcattgtcgccagttggctctaccgtccatatctgaaatcctcttacagaagacgatacaggaatatctttgcgtactgtatcaacattgagagcttgaagttcatctgtcagatagccttttagactttccattcgattatcaatggacttatcggattgctcccatgaatagtagactttcgcaaagttctctacaaaattttctacatgatgagtatcaacgtattccttttctatgatagttgtttcgtgaatagtatgagtatctatagctgtaaagtgcttgaatatcgcaaagctgaaactaagccctaaaagtacccacaaggcaatcacaacctttttatgaggattgaccttatagtagacacgaggtttcttttcctttggtatctgtttttctttattctgattttttctaaatttcatcattaaatcttcctttctcattgtttgattcgtcctgctcccactaaatgctgttgccagtaggggcttgttaagtcggcataaccgattgggtcgcctgcatgaaacatacggttattgccaaggtatatcccaacatgagtaatataagagccagcgttataggtagaatgaaagaaaaccaaatcgccagcttgtgcttccgatagtgggatatgctgggtcacatcatattgctgttgtgcggttcgtggtaagttaattccagcttttccatacgtccattgtgtcagtccgctacaatcaaaagaagtagtcggggaagctccaccgtaaacgtatcgccagccctcatatttcagtgcttcgtccatgatggcttgtaccgtatcatcatcaaactctgttgtgacaagatactgcgttaccagttgcacataaaacatattgccatagttgtatcgccagcccccattgataggtatggctatgggattggggtaagacactttttcgccacctgaatactcttttgagaaactttgagccagttcaaaggtatatttatttccacgattagccacataccctaagaaaccaccaccataattgtaggactggataaccgattctaaatctacactgagcctttcgctactggctaataattcactgaaatacttcacaccttgcttaatggattcttctgtactcaatgaattaggtggaagaccgagggattccgaggactgcataacatcttccgcagtaccgcccgattccacctgtataatcgcaagaagtatgttgacatattcttcaacgccatattctttggcatatttttctaccataggcttatgagccagcacttctgcggaaacattcacacctccataatgaatattggaaattccgctgtcctgttcatctgaaaataaaatggcaacaaacagaagcagtgagaagaccatcaagaataatccagaaccaccaatcactaaagttttcaacttcatggtttcttaccgactttcttaatggtggcggttttgattggtggtctacttcttgtattttgtagtggtactctttgaacagtagacggacgttcttttgtgattggacgttgtgaagttctatctgctgtagtggttgaagttgctggcttttgaacggttttttcttgaacggtattgccttggcgttccacttttggacttgaaaaatcggacttaactgctggacgctcttgtttggcttgttgagattccttatatgaagtctgaatattagactgttttgaggtctgttcatcatgatattgttcttgtcttgtagtcggtctttcatgaacagaagaagcaggctgttttttctgtttgacctgttccatttcagagcgacgcttcgcaatggtttttcgcctttgttcctgctgttccttgcgtccactggctctgtccgctttggtttgagaaatactactggttaaatcacggacattctcttttactttggattttccttgatatactgcatatcttgcattggtcggcaaatctttaacctgttctttcaaaccactagcagtgtctaccattctgtctttggtatcagctactgtaccgatggtttgaccgatacgttttccaagtgttgatttttcctttccgtctggtcgggagtgatctgcttgtgtccttgcagaactccccgaacccgactgtccttttttacctgtaacaatggcagacccagcccctagagtagtcatggaacgtccaagtttccgctgtagacggtgcatgtgagcgtgcataagcatacgaggttttctcatcacacgacttcccacactttgagaatcgttactctgtagagaaaacatactcattaaatcgcccagcttgaagtagattcctgcaaaggtcacaatctgtagaaaagcaatcaaaaagaacggataaccagccgataaggtatagagcatggttgaaatactaaatgctgtcgtaataatcaatgtgattccagctcgtgtcaaaatggtattaaagagctttgttatggctcgttttgacataccatcaaatgatggaatcatgcttaaaataaagctcacaggcagaaacatagcatagatgataaaaagtacctgcgagaaaatcatgattcctgttaataggaatacaaatatggaaatcccaatattgaagacaaataggaagaagactgtacctaaacggttaatggtctttgtaatggttagattggtattgcttctgtcttcaatttcttccgcaacaattttttctctgtcttcgccattgttggaatctgggctggtggagagcaggctttccacacggtcaataccgatactttcaatgtctgaactgttgtattgaagcagtagccacggttgctgaacctgtatggaaaacaggctatctctgattaagtccacgctgtccttgccttgactatcggaatggggcatgacaatcttcgtgccaagtgataaactggcattactgatgtctgatgaaaagtcattgatttttttaatgtagtcgggagcgtaggcaataaaggaagccgataggataaacaccagcacaaaattcataatggcatgaattgcctttgtggtttctctctttatcagtcccgtataggcaacataaaccccaagaaccaaaatcaagagtaagaggaatccaacatagaaaccctctgttgaaaatccgtttgcactcacaccagctaaggtctgcatattcttaccaatggaatctgctgtagcggaaatgaagtctaaggaataggcttcctgtactaagtaacctgtcgcattggaaacatacaaactgattgtccaaataaaattggtaatggcatatagtccatacatgacctgttttccaatcccgtccgaccagttccacggaagccagccccagctattatccacataaaaatccagttgatagttttcaagtgggtatcggctgtattcatttgccacattgaccgtatcatctaccaagcccgcagcttgaaccaccgttcccagcatggctaaaagaaaaatggcaatcacaagtgtgaaagccactgtcattgccactttacctagacgtttcagcgtccagtttgattttattctgtttactattgatggtttcacatttacacctcttttcgcacaggtggtctggtatcaaaggcatggagcagttcttcaaatacagggtggaactgtatcacaccgacacgaccatataaatcactgataaggcattgcccgttttccaaatcacgcaatcgcttctgattgttttcgtcctctgggtctacaccaaaaaaggctaaggtctttttaatctcgttaaggtcagtggaacgaaatgcaaattttaagccgaggttatttttcagtttttcatctaagaggtcgtctgtattttgggtcacgaaatataccccagcgttcatagcacgaccagcccgaaccagcttcatagatagtgtttttccttgtgctacctgtaaaaagctccatgcttcgtctaaatctacaatcttgaaaatgcttcggtctgtatggataaagtctaaagcaaaggtactaatgacaatcagcatagcaacggataaaagctccatagtggtatattcctcaaaggaagtttccttgtcgggaagtaccaagtccgcaacctgtataatgttcagttgtttttctaagctgatagactgctccacataaccattactgaataataaatgtgcaaagtcatagtctgtaaaactttcgatatggtcggctatactggtacttagtggcgtattctcaacccgtaattcctcaatcactttcatcaaccctcgtacttcactattggttactgcacgaatggcttttctaaggattgggaagcgttccccatcacgagaggaaatccccgtaaggaatgtcagaatatcaatagccagtgattcagaatctttgggatttttcataatcacataagggtcaagtaagcctttgtttttctcatcagaagtcagagtgacgatattgatttcatgggaaatctctggcaaggtttctttccatctgccacgttctgcttttgggtctacaatcactgcttgtgccccataaagcaccgcataatagacgataaggttattcgcaaaggatttaccaccacccagcgaaccaacaaaagccgacgctaacgcattggttactgaacccttaaccccttgactggcaagagcaggtttcagatagacattgcgtccagtatctaagctgtagccaacataaatcccctcattttcccccagcatttgagtagcaccaaaacctaaaccagcgaggaaatcagaggtcacgtattgaatataatcattcatataacgcttgctggcaggtaaaaattcttcatgtaagccgagcatatccccaaatggtcgtaccagttttacgcttaaatcgtcataaaaatctttcacttcattacaacgacgtttgagttcgtcaagatcatttgctgatacccttaccacataagacagcttgtacatagattccttgctttggtctaaattggtttccagctcattcacactttccagagcttccgccacattggagctggtttcattatcactttgccaagcgtggttatccaagtctttcagttctttctttttattgcggacagtagatagggctttacgattcgctacaatttccacattcattgacgtatcaatcgggaatgtaaattgctgttgctggtagtagaagatttcagaggacgggaagtccagttctccgacaatgctgttaatggtaaagtaagctacatagacggtttcatcttcctgctggattttcaaatatcgctgtttttcttccaccaaacagcgagtaggcttaatcaagtcatagtatttaatcagcgtttcattatccagctttttctttgatagatggtactcatactcttcataggcagtgcctgtctgtccgtaaaggtgttcaatcagatagccgaagtcgtccttatctaacctgcggattttgaaacgacgagagattttattttctaagagcttttccatcttctgaaaacgcaggatttcatcattactcatactaacaaaatcgcccatcagcttatggttcacatcatagacaaaatcagacaaagcattttttgcttcaacggtaagacttttcatagaaaactcctgatcgttgagaagcaacttaaagccgataaagaaacggtagttcacttgattttcgccaatcatggatattaaagcgtctgtctgttggtcgattttgtcataggcaaccgctttgagcttgccagtgacttcatttttggaacgctcttgtgcagaacgtatgctggattctgtactgatttgtaaagcatgaattttgccatcacgattttgtgcgataagctgtctgaaagaatcatgcacttgtattttctgttctggacttagaaatgagtaattgtaaggaacaagctcatagtaagcataacattccccgtctttattccagacgagattgttttcaatgtatttaattggatatgccataaaattcactcctaactgctgtaatggcttcttgtggctggtttctgccaagcgttactttttttcctgcataggtcagctttggtcgcagtgcataagcaatgacagacttcaaaaatccataaggctttttaccatcaaaagtttttgtagacataaaccatgtgaaagccacaggaatcccaaagtatttgagaaatgctccctctatcatggaaagagggggcaagttgccaagtatcatcactgcaaagagtgacacgacaaaccatgtcatttgcgtaaaggttatgggaaacggaagtctaaaatcattgatagaatacagtaccttttccacagaccagatactggtatagcttcgtattttcttcatgtaatcaatcctttcataaaaaataggggtagctgattgagccaccccgtaaaatagaaaatctgccagtagtaatgtaccgacagatttaatagacgatttcaaaaatcccatgattggttgagataaacgttcctgaaaggtctaaatcccgaccataggcttgataatcaatatagttttgaagactagctggtacttcgcctaaagcacccgtttcttcaatgtagtagcgtgccacgtcatacatatcatcacaatcggaatgaatgataatatcctcttgatgttcgcttagttcttcaatgcttgaaaaatgagtgagcagagcagatagctccgattgtaattcttcgggtaattccgataccatttcccatagtcgattgagttcgccaatggaagtgtattcgtcaaccgtaaagggtaactcgtagtcatgaatggcgtattcctcatattcatcattcaagccgattttctctttgacttcctcaaagtcaatgggaaaggtaaaccacgcaccgaccaattcgccctcattgtatttgcctaaattcgcaatatagacttgcatatcgtccatatattcacgtcctttctttgtagagattcaaaaatccctaccgcacttcgtttggtgtaccattcctttgcggaacataagaaaaccacttatattccacaaaagaacggttttatttaagcaccaataatgcgattgaatagctctagtaaaatgtcttttactccagcagcgttgaagactaagccaaccgcaataatcgcaataattaaaaagccaatcagtttgctaaactcacgcttgaagccaagatacaagccaatcacaacgattgctaaaagcaccagtgattgagcgtttgatagaaaccagttataaaggttttgtccaaaattcataaaaatgttctcctctctatattcaatgaatttgtatttgagttatttttttgttgttatcacgtcctgttcttttactgactgttgcttcaaaatctgcttgtgtcggtctgtcagtttcgcatggtcgagaatgtcttttacaacctgcgtctggttgatttcatcaagtttaatcgcaacctttaaggtcggggcaacttgatgagatagccagttcagcgtcctttggaaggagtaaggctctggttttgtggttagttttaatcgttcacgattgttcccaataaaccaagcccattcttcattcagtttccaatcagaacgaggtttggaatcgtctttatctacaaaacggatataccgattgataattttaaaggcggtatgctctggattgtcatagacgagtaaatcacggactgcataataggcacgctcatttttcaatcgaatctcaaaacggttttttacttctgcgtcttcaatgggaatatcatttttcttgtactgctcgtagtccttttcatagatacagaaataaacttcactttgtaatgaaccgatatagagggtgtttcccatacattccttttcctctttgcgtaccagttcgccactgcgatagcttttaaaactgcggaagacggagatacattcttcctgttggcacttttcagtgagtacagggatatttaaaatccctgtcttatcgttaatggcaaggtcaaggcgtttcatcacaccgccagccaccaaaacgtccataaagaactcataccagcttctttgttgtgccagaagatagctttcaaattgtctgcacccacgacctttcaattccaccagaactcctttgtccagttcatgggagcaaaggacgaatatgtcgcctaaagcataatgctctgaataagaatagaaaccatagtcctcatgaagaaaataggacagtttcagttgtaagatgttttcgaccacctgctgtacgtctgttgtcggaaagcgaattcttacataatcaaacagcatttcaaggggagcgtcgggattgaagcgttccagagcttcccaaagggactgctgtaaatcctctgatggcttgacttttcctgtttcaatatcgcttagatactgccttgtaataccagtcgcaacagctaaacggttttgagatagtccataagccaagcgtttttcttttaaatgctgtaaccaagtttgttcattcagtaaaaatccctccaatcaaaaaggcgtatgtcaacttttaaagcccatttgacatacgctgaaattttgtaaatcccttgtaaccaaaggattttctaatgtttttttgactgtttcctgtcgatttgtacccccctgttagatacggggggttaagtgctggcgtggctattgccacaccagccagcaagatcagtccacacctgcgacttccgcttcgcacgtcgcctgcgtggactgtctgctgttggataactttttaatttcctccaagaaatcatatccttttggtacaaggggagtataaaactctgatatgacacttgttcctacatcaacatagccacgacctttgattcgctttaagaagaaatccttttgtacgtcactgccaaacatcatgccatagcccatttcagacatacgacctaaagccactctgaaattaaactgatcacggattccgtcgcctaaatattttgcgtctggacgttgacaagccagtattagaaagaagccagcttgacgacctaacatgacaatctgtttcagcttattcataactgcggtgttttcttttgttcccagcatttccatgaaagcgacgtattcatcaaagattaagaagtgtgccgggagacctaagtaagcataatttttgccagtcttatagttcttcatctgcttcatttcctcactacgtttcatcatttcttcatagaatgtttcaatgcaagaaagcaagtcttcttttctatagtagacatttgccatcacagaacctaagtccgcaagatcagcatttttcgggtcaagaatatacagttttgaatctgtatgaagcaaggcttcaatcagtgtcagtataaagtaagttttaccgccacctgtaccaccagcaatcaacatatgagggagcttatcatattcccaccatacgtttttcattaagcgaagtttaccatctttagcttctacttcatcaatagaaatacgactggctatggtgtcatagagcaaagtatattccacataggaatcctttaactctttatccgtcagctcacagtacaagccactctctaatttcttttccaagtgtaagagttggtcttgatattttcccagcgtgatttccacccgtatctgtatcaagccatttttaagtcgataatacattttagggaagtaggttatcttttcctttgtacgaccagcactatctttaaagaaaccctctgttttgacctgttcagattcataccacttgttttcaagtatcatctttgccagtttttgacggtggtaaagttgtttaaccgtatcatagcgaacccgtttgaatacaaacgctaccagcaagcagataagaattgcgacactgaaactgataattaaatagggaatgtcaatcttatctgcttgtgataggttaaaatcctgccagttgatctgctggattgtcttcacatgaaacagtccgacaaccagcaggaaaacaggcaggagtgacgctatcgtaaaatgaaagactaaatctttaccagatgggcgaatccttttaccacgctgtttcatgcgaaaaagtctcctttctacctagcgactatttgtcttgtgtcggttctttctttgcttgtggttgagctttgaatgaactagaatcctttgtcagcacaatatcgtctgccttgatataccagtcaacatctgctccttgataggtggcagtagcaacggtgtccgcaatgggattgataagttccacccgtgcgttataatcaaactctttcaaaggcacgctggcaggaatacttacttgaatcatgcgtccttgtcctttggattttaagtcataggtacgttccttgatttcatctgaaaccgacccgtcttcattttggattctcacttcacgacgtagagcagagaatttcaattctccaaaagtcgtgtctttatctaatacaatgccatttgctaatctcatcatttttcctctctttctttattcttttatcatgtcgtcagcatgtaaaaggtaatttgtaaaaccacgagtgccgattttgtagccctctgcggtaatacgtggattgactaacttcacacgttcctcaaagccgaaatgtttttcgccagcttcagcaggaagcaccaccacaatatcatctgctctttgaacatcagaatagagattatagcttcttgataagacagttagccgtccgttgattcttcgctgaacgactttatcctcgccagcaaattctaaattgccgaatgttttttccatgttgggaatcacaaatttaagttccatatttttacctatcctttcttttttattggctgaatgaatgtttgatggtcttaaagagtggggaacgaccttttgattcttgattttttgttttcataagttcacttcctttcaaaatcgggtaaaaaaatagacacctcattttttgaagtgtctacctattaaatattcaaattttattggaagtatctttatatcttcacttttcaaggataaatcgtcgtatcaaagctcattcataagtagtaaattagtagtaaattgagtggttttgaccttgataaagtgtgataagtccagtttttatgcggataactagatttttatgctatttttatatataaaaaatataaaaaattggttcataaattaatttattcgatagaatgattcaatcgtctacttaaactttccgctgtgagaaaagtgcctgaaacaataacgtttcaggtactcgggagttttgagaccttaggctcaaaactaagtcatggaacttcttcgaagttcgctgatgtccgttctcacctaaggaaagtttctaagaggatcttatctacattctaatttctgagcttttcttattacatgatcccgttctttcctgtcggtaggttaatccctgcttccatcaaggcatcatggtagagtttatagtaggtatgatagacagtcgtctgggttccattttgcgcagtcatcgcgatgcggaaggaataacgaccatttttttcgatctgtgggcctaaaatcgtaggacctgtcaacacttctgggtgtttgtcttgttcagactgattgacctgagcaatcacctgatagatcttgtcgagatcggtatttgcatctagcggaatatcgattagcacgcgcatatcgccacgtgagagattgctgacgacggtgatgttgcgattcggaacaaagtggagagtaccatcaaagtctcgcacctgggtcgtccgaatcccgacactgctgacgatgccggcaatattaatagacccattcgtgagacgaacattgtctcccacatccagctggcgttctaaaaggataaagaaaccattgaccaaatcggaaagaaagccctgggctcccatcccaatagccaccccagcaatcccagcaccagccaagagactagagactggaaggcccagaatcgacaaaatccagtagatcaagatgaaatacaaacaatagtttaagagactctcaaccaaacggagaatcgtatttttacgggcttcatcctgcaccgtatacttaaaggatggtgttaatatccgcttaaccaggctatggatgacctttttcgcgataaaaaataaaagaaagacaaaaatcagagagatacattttgatatcagatcatcaaaaatcttcgtccagtctattttactgaaataacgttggaaagcttgactcatttattcgggcctttctatcaaagaatagtatgattatatcaaatattcggaaataaggctattttttgaaaatttcattgctttccccccctaactatcgtataatattccttaattattttttaaggaggtcttacatgattcatcgattgattaccacttggaataaaaccaaccttatgaaaaggatcgcaatcgggattgtacttggtgtcatcctagcccttctcttcccgaaagcaactggcattggactcttaggagagttctttgttggggggctccgtgcgatcgcacctcttttggtctttgcactcgtcgcaaacgccctctcccaacaccaaaaagggacagagactaatatgaaaaaagtcatcgtcctctatctcctaggaacctttgctgctgccttcgttgctgttttggtcaattacatcttcccgatcaccattaccctgactggaaaggccgctgaaggatcctctccaaacgggattggcgaagtgattagtaacctcttgctcaagatcgtcgacaacccggtcaacgccttgcagcaagccaactacattggaatcctttcttgggcaaccgtctttgggattgccatgagagaggcgagtgaacatagtaaagacctcctccaaactctagcagacatcacttcaaaaattgttgagtggattatcaacctagctccatttggaatcttaggcttggtcttcacgaccatcgctggccaaggactcagtgcccttagtaactacgggattctcttacttgttttggttggtaccatggcatttgtagccctggtcatcaatccattgatcgtctttttcatgatccgcaagaacccttatccccttgtttttaaatgcctccgtgtcagtggggtaacagccttcttcaccagaagttctgcagccaatatccctgtcaatatgcgtctctgtgaagagttggggctgaatccagacacctattctgtctccattccacttggttcaactgtaaacatggcaggtgcagccgtgacgatcaatattttgacgctcgctgctgccaataccttgcacattcaggttgactttggaacggcgctcatcctgagtgtcgtagcggctatctctgcttgtggagcatctggagttgcgggaggatctctccttctcatccctgttgcttgtagcctctttggtatcaccaatgatttggccatgcaagtcgtcagcgtcggctttatcatcggggtcatccaagactcatgcgaaacagccctcaactcttcgacagatgtgctcttcaccgccatcgccgaaatgagtagctggccaaaagaaaaacgctattaaatgctcctatctcaaatagacaagaaaacccagacctcgcgatctgggttttcttatttcttaaagtagcgattgctttctttgataatgacaggtgacagagctagtagggcaatcaagttgggcagagccataagcccattaacgatatccgcaatgacccagaccagatctaattttaggaaaccacctagtccaaccattaagacaaagaagatccggtaaagattgatatgtttgacaccaaataggaattcgaaacaccgttccccgtagtaagaccacccaagaatggtcgttgtcgcaaacagcaccaagcacagcgttaagataatgcctccaactgggccaaagacacctgtaaacgtatcctgagtcaaggtactagtgctgcccttagccatccactcacctgaaaccaagagcgagagtcctgtcaaactacagatgataatggtatcaataaaggttcctgtcatggagatcaagccctgctcgactggctcattggtcttcgccgctgctgctgcaattggggcagatccgagaccagattcattagagaaaactccacgcgccacccctttttggatagccattttgaccgttgctcctgcgaaacctcccatggctgcagtccctgtaaaagcacccgaaaagaccgatttcaaggctggaagcaattgatccagatgcaaggcaatgatcgtgacagtcgcaaagatataggcagccgccataaaaggaactactttttcagagactttggaaatccagtgaatcccaccaaaaatgatggtcgaaaccactagcgcaatcactacactagccacttctggagccgttccaaaactagcttgaagggatcccgtaatggaattaacctgggtcatggttccgatcccaaagagggctaccaacactcctgcaaccgcaaagaaaatagccagtggtcgccacttctctcccatcccgtgaagaatgtagtacatcggaccacctgagatatgaccgttgtcatccttggtccgataacgaatggctaagagcccttctgcatacttggtcgccattccaaagaaggctgccatccacatccaaaagagggcacctgggccacctgtctgaatcgctgtagccacccctacaatattccccgtccctacagtagccgctagagctgtcgcaagggctccaaaacttgagatatccccgtgtccctcatcttctgtaaagatcaggcgaaaagcttttggaaggtagcgtatctgaagcaaacccaagcgaagggtcaggtagatccctgttcctaccaagagcaccaacagtggggcgccccacactagattatcgagttgttgaaaaaactgcaatacatgatccattttctgtctcctttttcatcgaccgctcgacagaaaagagaaaaagaaagagcacatgtcaaacatgtactctggtcctgcttaaaataggggctttccctatctttcgctctgtccttttacctgagagtttgagtagatgcatcctctaccttgccccttcggtgccatttctggtctctccagagttccgtccattcacagtcactcgcgctcctgcaaacttcattcggtcgtatgtaattttctctattttaattgattttcaaaagtttgtcaatcgtttatgaaatcatcttgcaagcaacctgaaaatttacgctttttaatcactcaaggagaagtgattggtcatgaggttgctagcatcgagcaaaatcttgtccaagagttgatctgtcgcttcctggatttgatcactcatagcttggttttctgcctcaaaatcaacggtttcagctgctgcaagggcacgatcgactttattgatgcgtgcatgtccccaagccattgtcgattcttggtaatcatctagatcgccaacatggtgggcatagtgaggatctgctagtcctgcaataatccggttagcccagtagaaggaatccgttgtcaccttagccgtcgtattggcaaagtaatctggcgttgtatccacttgggtaaagaaagggacagctgtgttgtatggcatggagccgtatgaaatccattggatgcctgtcgtttcttgcggcttgttgggacgcaattgcagaatcgctgtttgactggtccggttgatcccgatcgtccggaaagtccgctgactcacgtgatctccctcaggagcataaggatcgtagatagtgtcttggtagtggttactcaagacatatttgacatcttcaatcgtcaccttgcgataaggtttttgacaccaagggatctcgaagctccgtggatcctgctcgatttcaggattgaggaaacgctggatggcccaagcccgcggtgtattgtagtgacggtccttgtctttttggctaccaaaggcatagcgtggattaaagcctttcccttcttgatccagaatcaaatggtgttctgtgacaaaatgttcaagatctgggtcacaaagaaactcgtctggatttccaaattcaaaataatcacttcccagttggttcgggttggtcacataggcatcatctggtacacggcgcgccatccagtggtgacctccaatggtttccaaccaccagatttcattcacatctgaaatcgcaatcccgttagattcataggttccgtactcttctaaaatctttccgagacgcaaaaccccttcgcgggcagtcttgacataaggcaagaccaaggtcagcatgtcttcctcaccgatgccactctctacaagaggatcggcccctagcacacggctattagtcgtaatggtctctgtctcactcatggcgacattatagatattgatcccagcttctccccagatcccgtctttcggaatggcatctggaaccgccgtatagcgaactggattatctggcaaatcgatttcaaaagatgataaaatagacttgtaatgacgcggttgatcttccggtttgaccacgatcaatttcttgggcgtaaaaacgccattttgagaatcctctgttcgtgctacaatggtcgaaccatcataactagcattttttccgactagaatcgttgtacacgaatctgcactttcacgtttacgcatgcgtatcctcccaaatcattcattgcctctattatagcacttttaaaaaggaggacctactgaaaatctgatttaaaagcgaatccttttcaacaactttcaatcatttttattttataaaattttaaaaaccctagctgtttatcagctagattcagattgaagaaaaagttatcttagaaactttccttaggtgagcacggacgtctgcgaacttcaaagaagttccatgactaaattaagatacaaagggcgtctgcggataaagtcaaaataggaagtttgacgcagaatctttcgattctaggagaacttatctttttgacacaatccgcagcccttgttcaatttgtattgagccccttcgctctttaatttctgtgctcaggctaaaacagtttcccaaactgttttactctcaataattccgagtgcctgaaactgtattgtttcaggcacttttctcacggcggaaagtttcggtattttcttaattcattctaataattggaacatatttatatttctttgcagaattacttaacttatttttcttttaaaaaatttagtctacattctaaaccctagctaatgaaaagctagggcttaacttatcctttaaacgtaacaatagtcgcgccgcttccgcccgcattttggggggcatattcaaaacttttgacatgtttgttgcgtcggagatacttggtcaccccttcacggatgacacccgtcccaatcccgtggatgatatcgacttgggccatattgttgagcagggcctgatcgataaagccatctagctcttgcatagcctcttcatagcgttttccacggaggtctagacgcgctctgggcccactcgtgttcgagcgtttgacgacattcacctggcgtttcttaggttgagttgcttctttttcagccttgatgaggttgaattctttttcttccaaggtcatcttgatcaagccgacttgcgcctcccagcggccatctttgagttgcttgaccagggttccgcgttggccatagctgataaccaagatttcatctcccaccttaggagcacgcgcctttttggcttttttcaagaccttatttttagaaaggtctacggtctcaggagctagttttttcaactgagccttggcttcaatgatctcatgtggtttcaactgggatttagcgtgaaggccttgaaggatgcggtcactctctgagagggccatgtccacaatttccttggcctcttctctcgccttattgagctctatttctctctctctggtcagttcgttatagagttttcgaagagcgcgattgaatttgagattttcttgctcgacctcttgaatggtatccaagcgcttgcgactttctaaggtctgcgcctccaatttttcaataatttgattgacatcattatccgtattggtcatcttcatagcatcctggataatggtctcagacaagcccaaacggcgggcgatttcaaaggcattggagcgaccaggaactccttgcatgaagcgataggtcggacgcagactcgctgtatcaaattccatgctggcattttgcacgcctgcagtctcaattccgtaggccttgagctctggatagtgggttgttgccatggtcttaatcccgcgtaagcgcaggtcttctaggatagcaatcgcaaggccagccccctcttgaggatcggttccagcccccaactcatccagaaggatcaaggaggcagtatccacttgatgtaagatagatacgatattggtcatatgactggagaaggtcgacaagctctgctcgatcgattgttcatctccaatatctgcaaagacttgtgagaagatgcccacacgacttcctggatccgctaggatgggaagaccagactgggccataatttgcgctagtcccagcgtttttagcataatggttttcccccctgtattgggaccggtaatcacgatttctgtcaagtcctcggtaaaatgcaggtcattcgcgacggcattttcaatcaagggatgacgtagttgcaagagctgaatagagcgattgctgctaacttctggtaccactgccttataatcgcgcataaagcgatacttggccttgatcaagtccaagtgaccgataatccaagcgttatttgcaatctctgctgcatgagggcgcagggtgtcagacaattcctccagaatctgaatgatttcataccgttcatcggctcgatggttggcaatttcttcattgagattgacgactgcccgaggctcgatataaacggtattcccgctggctgagatatcgtggaccacccctgcaatccggttgcgataggtgttttttacgggtagaacattgcggccattccgactagcaatcacagcatccgccaacatatcggccttgcttttcagcaggtcttggagaatctctctgacctggtgttcattttcctggattcgacggcggattttggccaatttttcactggcaaaagactcgacaaagcctccttcgttgatagcttgaagcccaccttgtaggcgtggtaaatccaccaagttgtcaaagaggcgattgagcctttccagacggacattttccaagttgtcgtagaaatccttgagctcatgtgtcacccgaaggaccgcttttagcgctagtaattcatcgatattgagggatgcctccatccccaaacgcttggccactggacggacatcttgaatggtcgacacggcaaagcgaggctcttccaagaggatctgctccatatcttctaactccataaaggccgtttcgatgctttcttttttatcagttggagtaagggctgctagctccatctccccttgttctgtctgtagatagggttcaaagagttgcttgaccttgccaaactccagaatatctaagatttttttattcatatttctcctacaaaaaaagtgagcgtccttccttgaatcggacttgtctcactcctttcttcatttttgctccttaagctccgataatcgcagtcacccacaagttgtggaacagactggaactgatcggggtatgaaggatgataaagcggatcaatccacttgcatttagtctattttggatggaagccatgggaaccgttgagaggacagtcaagcccatctggatgaccaagagagttatcacgacggcgatcacacccgctccaatttgatacttgcgatcctccagtttttctggctggggtaccaagtgcataaaaatcccaatcacacgaccaatcagatagactatcgcaaaaatcaatacataagctaaacctgcataaaagatgtcatctaattgaaataggtagcggttggcataaaaataattcaccgattgccgagtaggactcgaaaaaggaacccatagagacaacaccttagccattcccttgtagctaccacctgcaatcaagagggccactaaggtcactagaaagtaataggactggaggataatccctcttgcatagccaatataaaagctccatgccaaaatcaataagattaagaaagttaacatgtatctcctcttatttggatgatttatcctttaagtcgtctaaagccttgcgacgaaaatcatctaattctttttctttgtcatcaaactcaatctcgcgattcagctgcatggacaaactgtttactgccaataagatcgcgatggtttcatcatctgcctctggcatttgttccttaattgcttggtatttttctttcgcaacacgttcgacttcttccataaacaaattatcatggttggttgttaaagtgagcgctttgtttccaaatgtaaatttatatctatttaagctcgccataaaaatcacctcacggtattataccaaaaaaggctagctttgtcagtagcaaagcccctcttcacagggattttccagtggattctttctttctttttgctccctctctccctgaatttgtggtacaatagtggttatggaaagtatgacactcactccaacacaggagcaaatccttgattttgtccatacctatcgccgttctctctctcaaagcaagaatcctcatatggattatttctttcgactagagggagcgaccgtttcgatctacaagtctggaaaagtcttgcttcagggcaatgacctgactccttacctggcctttttcgggcaagatgctgagaaccctaaaggttctactacttcatctgcaggacaagatttagccatgatcggaaccgacgaggttggaaacggctcttattttggtggactcaccgtcgttgcatcctttgtcacacctgaccagcacgactggctaaaaaagctcggtgttggggattcaaagaccttggatgatcgaaaaattcagcaattggctcctctccttgaggaaaacatccagcaccaagcactcttattgtctccaaagaagtacaatgaagtcattgcttctggctacaatgctgtttcggtcaaagtggccctgcacaatcaggccatctatcttctattaaataaaggagtccaagcagagcgaattgtgatcgatgcctttacgacggctaaaaactaccaaaaatacgtgaaagctgaaaaaaatcaggtcacccaagccattgatttggaagaaaaagcagaaggtaagtatttagctgttgcggttagttccatcattgcccgcaatctcttccttcaaaatctggaagatctgggcaaggaactgggctttaatctccctagtggagcaggggcgaagtcagaccaagtcgctgctaaattgcttcagacctacgggatgaaagctctggattattgtgccaaactccattttaaaaacacagaaaaagcaaagaaattactagaaagataagttatgtcaaaaagaagttcaaaacagtcatctagctcaccagtggtgagattccttaaagaatggggcctcttcagcatcattgttggtctcatcatcgcctctcgcatctacctctgggctccggtcaaggtggatggccattcgatggatccaaccctagcagatagcgagtacctccttgtggtcaaccacctctcgattgatcgtttcgacattgtcgttgccagtgaaaaagacgacgacggtaaaaccaaggacatcgtcaaacgggtcatcggtcttcctggagataccatccaatacgataacgataccctctacatcaatgggaaaaagaccaatgagccctatttgaaagactacatcgctcgtttcaaaaaagataaattgcaatcgacctacactggaaaagggttcgaagaaaacggagaactcttccgccaattggccaatacagcccaagcttttacagtagacaaggatggcaatcctaaatttaccttgaagttgctcgacaatgaatacctcctacttggagatgaccggatcgtttcaaaagatagccgtcaggtcggagctttcaagaaagaacaaatcaaaggacaagccgtctttagactatggccgatctaccctttcaaaacttattagtatagattaacagactgaggctgagacaagtatgtcccagcctcgctttataaaaaggaaagaaatgatggaatattatttttctggtactattgagcgcattatttttgaaaatcctagcagtttttttcgaatcctcttgctcgacatcagcgataccgatgccgaagattttgatgattttgagattattgtgacaggaaccatggcagatatcatggaaggcgaagactacaccttctggggtgagctggtccatcatcccaaatacggagagcagctcaaaatcagtcgctatgaacgtgccaaaccctctagcaagggcttggtgaaatatttttccagcgatcactttaaaggaattggtctcaaaacagcccaaaaaatcgtagacctctatggggacgataccattgacaaaattttggaggcccctgaaaaattagaagaaatcacaggtctctccaagaaaaaccgcctggcttttgtggaaaaactccgtcagaattacggaacggagcgcattctcgcccaactagccaactatggcattcccaataaattggcctttcagatccaggatttctacaaggaagaaaccctccagatcgtggagcaacagccctaccaattggtggaagatatccaaggcatgggctttaaaatcgcggaccaattggcagaagaattgggcattgctagtgacgctcctgagcgtttccgcgcgggtctgatccacagcctctttagctactctatcgagactggaaatacctatatcgaagccaaggatctcctgcgctataccattgacctgttagaatcagctcggccaatagaattggatccttccactgtcgcccaagaattaggacgcctcatcgaggaagacaaggttcaaaatgtggacaccaagatctttgacaacagcctcttctttgcggaggaaggcattcgcagccatattggtcgattgttggaaaaaggaaagcaagcttcatttgaagccgagaaaatcaaccgggctatcgaggcggttgaaaaagatctggggattcgctacgatgccattcaaaaagaggccattcaccaggctatccaaaacaaggtctttatcctcactgggggtcctgggacaggaaagactaccgttattaatgggatgatcagtgtctatgcccaactccaccaactggatcttcgcaagaaacaagacctgccgatcctcttggctgctccaacgggacgggcagctaggcgcatgaatgagctgacaggacttccgagcgccaccatccaccgccatttggggatgacaggagatgatgacaccagccacttagaggactatctggatgcagactttatcattgtggacgaattttccatggttgatacctggctggctaatcaattacttagcaacattgcaacggatacgaaactcttgattgtgggagatgccgaccaattaccttccgtcagccctggtcaggtcttggctgatctcttgcagattccgagcatccctcagaccaaactggaacatattttccgacagagtgaggactcgaccattgtctcactagcaggagatattcgccagggcaagcttcctcaagatttcacagaacgaaaagccgaccgctcttatttcgaagccggaagcgaacacatccctaagatgatcgaacaaatcacttctgctgcccttcgtagtcaaatccctgctcgagatatccaagtcttggcacccatgtacaagggccaggccggcattgacaatatcaatacgctcatgcaagaccttctcaatccagctgtcaaagatcaggtcgtctttgacacgccagactgccaataccgcgatggagacaaggtcatccatctggtcaatgatgcagaaagcaatgtctttaacggagatatcggctacattaccgatcttctcccaggaaaatatacagaatccaagcaagatgaattgactatccaatttgatggcaatgaaatcgtctacccgcgcaatgaatggtacaagattcgcttagcctatgcgatgagtattcacaaatcgcaaggaagcgaatttcctgtggtgattttacccattaccaatcaaagccaccggatgttgcagcgtaatttgatctataccgccatcacgcgctcaaagagcaagctgattctcttaggagaatacagcgcctttgatttcgctactaaaaatacaggtacagcgcgcaagacctatttggttgaacgcttcaaggaactggacggaggcgaagcaaccacagactattcttcatcccttgcaacggcttctgctacagtcgaatctgcacgaagcaaggaagaaactgttgaaacgaaagcagagacgtctaaacctactgtctatcgactaacagaagacaatctccacaccatctcgcctatgattggactaacagaagaagagattgcagccttctttgatatcaaaaaagacgactagtgaacagactagttgtctttttcttcctctaccagaggcagttcagtatgatcgacgaaattggtcatggtgacacccaagaggcggattcctgtatttatcgattcgatttcttgaaaaatgtgacgcgctgaacgattgatgcgctcagcatctcgcgttggctccgtcaaggtgatacgcttagtcaaggtggtaaagtctccatagcgcacttttaagaccaaggtctttccttgcttgccatgtttttccagcgattgggccaccttactggacagattggcaatttcttctaaaatatcatcctcagcataaaggagcttgcggtaggtccgctcttttccgatcgacttgcggatgcggtgacttttgacagggctattatgaatccctcgtgccttgcgaaagagatcatagccaaatcgcccaaaccgatcaatcaaagtcatctccgggatgactaaaagatccgcgccagtatagacacccatctcatgtagtctctctactgtcttctttcctactccatgaaatttggcaatgtccatttggctcaggaaatcctcagcgtcctccggtaagaccaccgttaggccacgaggcttttggtagtcactcgccatcttggccaaaaacttattataagaaacacccgctgaagctgtgagatgcaactcttcccagatagcatgctgaatcaagcgggcgattttgacagctgatttgctctggattttattttccgtcacatctagataggcttcatcaatactcatgggctcgatgagatctgtataacgcttgaaaatctcacggacctgctcacctacttctcggtatttctcataatttccagagataaaaatggcttgaggacaaaggtccagcgcttctttagagctcatagctgaatgaatgccatatttccttgcttcatagttacaagtcgagacaacacctctccctcctgactgacgagggtcctggccaatcacgacaggcttaccctttaaactagggttgtctctttcttcgacggcagcaaaaaatgcatccatatcaatatgaataatcttgcgactggtatcattcactaatggaaatatcagcatttttcaccctcctttctttctattataggaagaaaatttcagaattgcaaaaatcggctctccagaaaacatgaaaattgttgaaaaactgtgtttgttttcaaaaatatagtacagtatcgcagaggatttgaaactgtattacaaaagaatctgctgtttttcgcaattcgcctttgtgtaaccgatttctgtatggtatactactattgtaagtgcaacagatatagttgctagaaagacaatagaggaaaataaaaatggttgttaaaacagtcgttgaagcacaagatatttttgacaaagcctgggaaggcttcaaaggtgaagattggaaagaaaaagcaagcgtttctcgcttcgttcaagctaactacacaccatatgatggagatgaaagcttcctagctggtccaactgaacgttctcttcacatcaaaaaaattgttgaagaaacgaaagctcattatgaagaaactcgtttcccatacgataaccgtccaacatctatcgctgatatcgcagctggatatatcgataaagaaaacgaagtgatcttcggtatccaaaatgatgaattgttcaaattgaactttatgcctcgtggtggtatccgtatggcagaaactactttgaaagaaaatggatacgaaccagatcctgcagttcatgaaatcttcacaaaatacgttacaactgtaaacgacggtatcttccgcgcttacacttctaacatccgtcgtgctcgtcacgctcacactgtaactggtcttccagatgcttactctcgtggacgtatcatcggggtttatgctcgtttggctctttacggtgctgactacttgatggctgaaaaagcaaacgactggaactctattactgaaattgatgaagaatcaatccgtcttcgtgaagaagtaaaccttcaataccaagcacttcaagaagttgttaaattgggtgacctttatggtgtagacgtacgtcgtcctgccttcgatacaaaagaagcgatccaatggacaaacatcgccttcatggctgtctgccgtgtgatcaacggtgctgctacttctcttggacgtgtgccaatcgttttggatatctacgctgaacgtgacttggctcgtggtacatttactgaatcagaaatccaagaattcgttgacgatttcgttatgaaattgcgtactgttaaatttgctcgtacaaaagcttacgaccaattgtactcaggtgacccaaccttcatcacaacttctatggctggtatgggtaacgacggacgtcaccgtgttactaagatggactaccgtttcttgaacactttggacaacatcggtaactctccagaaccaaacttgacagttctttggactgacaaattgccatatagcttccgtcgctactgtatgcacatgagccacaaacactcttctatccaatacgaaggtgtaacaacaatggccaaagacggatacggtgaaatgagctgtatctcatgttgtgtatctccacttgacccagaaaacgaagaacaacgccacaacatccaatacttcggtgctcgtgttaacgtgcttaaagctcttcttactggtttgaacggtggttacgacgatgttcataaagactacaaagtatttgacatcgatccaatccgtgacgaagttcttgaattcgaatctgttaaagcaaacttcgaaaaatctcttgactggttgacagacacttacgtagatgctttgaacatcatccactacatgactgataagtacaactacgaagcagttcaaatggccttcttgccaactcaccaacgcgcaaacatgggattcggtatctgtggatttgccaacactgttgatacattgtcagcaatcaaatacgctactgttaaaccaatccgtgacgaagatggctacatctacgactacgaaacaatcggtgaatacccacgttggggtgaagatgacccacgttctaacgaattggcagaatggttgatcgaagcttacactactcgtcttcgcagccacaaactttacaagaacgctgaagctacagtttcacttcttaccatcacttctaacgttgcttactctaaacaaactggtaactcaccagtccacaaaggggtatacctcaacgaagatggttctgtgaacttgtctaaattggaattcttctcaccaggtgctaacccatctaacaaagcgaaaggtggatggttgcaaaacttgaactcacttgcaagccttgactttggttatgcagctgacggtatctcactcactactcaagtttcaccacgtgctcttggtaagactcgtgacgaacaagttgataacttggtaaccatccttgatggatacttcgaaaacggtggacaacacgttaacttgaacgttatggacttgaacgatgtttacgaaaagatcatgtcaggtgaagacgttatcgttcgtatctctggatactgtgtaaacactaaatacctcactccagaacaaaaaactgaattgacacaacgtgtcttccacgaagttctttcaatggatgatgccttgagctaagattcaagcaaatcatataaaccagtcggaaacggctggttttttcatcccatcgcaagattattctgaattttgaaagagtttaagagcctaccacatagagtttgacagcgttttcttcaaatgttatagtagagctgtaaataatatagaaggggtgatcctatgtttttaacatttgttctcgctattatttggctctttatcttgattgcactgatctttttagcaacccttctcgtccaggatatgaccgtgcaacatcaccacccgagttaacgaatgataagactaaacaatagctattctaaacgaattcagaaaggataagaaacaaactagaattgtcagattttagttctgtctctcgtccttttttgctataatagaaacagattatttagtaagaaggaaattatggaagagtcaaaacagatcaaccaagtgatcgacgttctgatgttagctggaactctcctgttagaaagcggttctgagatccaccgagtcgaagatacgatgatccggattgcccattcacagggaatcgacgattgcaatgctttagcgatgccggtcgctattttcttttcaatcgagaatgccaatatcacgcgtatgaaacggatcttacggaccaattacaatattgaaaaggtctgtgatgttaaccagatctctcgtcaactggtctctggagagatggatctctctcaagcctaccaggccttgagagagttaaaaaataagcgcgttccttataccaatctccagttgaccattgcggcgactctcagtgcgcctttcttctccatcatgtttggaggaaatgtctacgacgcgattggggcagtcatcgcaactgtttttgccttttctttttcacttgtcgttgagaaatacgttcgtattccttttgcaacagcctttgcggccgcctttatctttggttttttggcccatatctggacgcgctatagtggttttccttccaataccgatctcattatcgcaggctgtgtcatgcccttcgttcctggaatcgctatgaccaatgccgtccgagatctgatgaattaccacctcaattctgggatgagcaaactctttgagactctcctcattactcttgcacttggtgccggtacaacggtcgccctcgtccttatgaaataaaatgatgaacctaactgaatttttaatccaagcggtggccagtttgattgccatcatcacctttttaatcgtcctaaatgtgcagcgctccatgttgattcctggaggaatcctcggtatgggcatctggctactttactatatcctgaaagggcctaccaatgtcatcgttgcaacctttatcgcagccattgtcggctcctgtatcagtcagattttaagtattattctcaagacgcctgtcgtggtctttatgttgtccattctagccccattggttcctggatatatttcctatcgaaccacttccttctttgtcagtgggcaatatcgccaggcagtaaccagcgtgacactggtggttattctggccttggtgatctccatcgggatggctagcggctccgttgtcttgaaactctaccattcttaccaacgccatcaaaaaagaaaaatgaccaatgctaactagcatttgtcatgttggtaacaaagtcttcttaaaactttccttaggtgagcacggacgtcagcgaacttcgtagaagttccatgacttagttttggacctaaggttccaaaactcccgagtgctagaaacaatagtgtttctagcacttttctcacggcggaaagtttttgtattttcttgattcattttaacaattggaactcatttttattttttgaagaaaactaaaagtttatgtacaattgactaaactaaagctaaaccattgatacaactgaattagaagcataaagtacattctttaaaaagtgtactttatttttgttttgtaaattattctgaaactactttcacatattaaaaattgaatctaaattgctgtaggcctataataaagataggaataataagaattcttcctagaaaggagtatactgtatcatatgtgacagtattataaatgaatcatgaaaaaaataattactatagtacagtgcattttgttcctcgtgtctccttacatagctagagaactatgcttgatgagtaaaaatctggtggataatatgttcctcacattctttatcatgctaacaatttctttttggcttggtatttggaagttaggagatcttgcgggaaatccaaaatagaaagtaataagttgtgctagagatgaaatttctatttattttaattatttttataccttatttattttattttatatggaagtataagcctaaacaaaaaaataagtccttttgctatctttataagttttacatgatttacttgtggtttatcctcataattaccataatggctatcggtattttatcccttggagtagtagctggtatgggagaaaaacttacgtttggtttctttgttttatctttttcaggtgtagttctatttagtttatatatttttagtattctaaaagagataaaggaattaaagcaaataaaaggtaagtaaatattaactaagagaactagctaactagcttaagcaaaatataacacggctatgattcatgagccgtgtttttgtatgaatgtacaattgaaaaatttttaattttcacttaaataaagtacataattgacaatgattagcacaaaacattttttggttatcaagaaacgaaagtagtatgccatctttttacgaaaaagcctattttcttcaaaaaataactttccgaaaatttttcttttcccgaaagatgttgaatgaactaaaaaacagcctaaaccgttggggctgtatggaattttagtgatagattgtccgccctctaaacttaaatcagctcagaatgactatcttagcatgattttttaacattttatgcaaaaaaataactattcggtatcaaaatttcgagaattttaccgaatagttaaaaaaagagcagaatagaatttttttatcgtatctaatttatagagtttgttgggattgttgctgagttttttgtttatcattcgaactttattattatatcataaaaatgattagaaaaacagacttgaattattttgaaattggtatatgatgaaggtataaaaactattaaaatagcctgatagaaaggggaataaaagaattaatcaggctatataaaattggtgattggtatttaatgttgtaaaacaagaaaggaaaaggtaaaatatgcaattacataaaaaattttttatagtggcgttggttttatccatttgtatctcactttattttcttatcaatccgtctaatatcttcacctttccgatccgtgtgcattcatttgatgacacatttaaatattacatgtttgtgaagattggaattgtattattatttatcaaattcttactggatatatgcttagagtatatcaagaattggtttaaaaagttttgatatatcttcacacaaaaaacttagcatgtttaggaactgaaccccaataatggaacaagagaaaaccctcttatgcgaccagttttctgtactctacaggaggctggtcatttattttttataacatgttgtatataaaaattgaaacaatagaaaagattaagagaattaacaagataaaaataattattttttttcattgtagttctcctttattttttgtatgattatatcagaatgtttttaaaaaatgaaagggttttctatggaaaatgatgtgttttttgattattttttaagatcacttaggtttcatttacgtgataagtgtaaggatattggatttatagagtttttcaaagatgaaaataattgttttattactatagaggattatgttttggaatcttttgtaatattgtcaaatattttgagtcaggagaggattgtgttttcttgtggaattatttatagtaagggggtagttactggagtagaagtatatatgagtgtattagagttagaaaaattaaataaattgtttaaaatatagttttgaagcatattaaattttgtcggacaataacgaagcggtcctactagtcattttgaaagctggatgacttatctaagccactcagctttcaaaaaaagtcccattgttagtctaagttgttagtattaaaaaaaagacaaggtttttttatccttgtcttttcgttttagtattacttaggtttcaatgtcaataagcgtgttctttttgtagtattctatagattcgaggtaacattatcatggtatagatcaggagagaaacacctccaaatatgaatatcagacctccgtttatgtccttttgaaatagataagtaaatacaatggtacctatcggcatgatagacgtatttagtgtgaacaaagtactcattactcttcctaaataatttgtttcaatactactttgaagataggtcatgacgacaatatttagaataacaagagtgaatgcgataattcccataaataaaccgccaacggaagaaataatcacttgggtgttagtagttgcaaatgtaatacccaaaccaacgatagcgatggttagaagaaaaagtggaatgcgaattctattagagagaagtgtgttattttcttttttgtctggcagtagcgacattgacacactggctaataacattccaaccgcagacattgtttctaggatacctactgttgcattatctaataagagttgctctttgactacaaatggtactccaatgctaatggaagtatagaaaaaattcagtacaacactaacaagaataatatatttgacaatctgattttcttttaagaattggataatttctttgactccatgttgatgcttttcaatctgtttaatcttagcttctttcacttcgtgttcatagaagaatttcatggtaagtaagacgcctaaagaaaggatatttgcaatgatttctataagaataaagcctgagaagcctaaccaattataaagaatgactccaatagctggggaaagcatggttgcgatagcgatggcggtttgtgtaacagaacttaatcgttgaatttttttatcgtttactaactcgtggatagaggctgaataacaagtatcattgatgttaactgtgacagagtgaagtatgacaaacggaattactaaatataagatagtagatgaattcgttaaaaaataaaatgcataaaacagaagaaagataataattctaaaaataaaattataaattaagatctttttatgacggtatcggtctactaaattaccgattggaaccaagaaaatcaaactaactaaaggatagatgatcatattgattccaaaactcattgccgattttgtttggtccagtaacattaatcctaaagcaaaattaaaagcttttccacttaaagaactaataaaactactaataaagtctttgatgatttgtctattagacatttgatcacttattaaattcttaatattagccccctccattcgtttcaacattacttcggttatctaatcctattcaatcaacctgtgttgtaaggtaattgggatagtagatagaccataatttttattaattaagattttaccaattatactaataaaagtataataaaaaatgtaaaaaatattgtctttatgtttactaattatatttctctcttgctttgacattatctaaattgataacttcttacgtacctcttctaaaataggatatattttacaatcgttaaaggatttcaaaatgaaacagattgttttattttgctttttgtaggttttaacttcattctagatgttgatactatttatcataacgcttgacgtcgctttcaaacgggagtacaataatattgaggacaagatggttaatctcttttatttaggaggtgtcagatatgcaaatctattttgtttattctattttctatctattatcacgcgtagtagcacttgtagttctagcttatcttattaagttactcattgctcgtttaaaaagaaactaagtaacattttgcccaaatagtagttatttgggctttttgctatactttagcctagtggattaaatttataaagataggatttagcatattcttattgagtgattttattttatgaaggttgtttataggtaaaggggaaaatagatggtttctaaaattgatgtggcttgggacttgtttctggagggaaaaacatcagaagctaaaaagttggttgaacaagatttttccattgatacctgtacagattttagccttttaaatctgatggggtatttattattggcagaaaaagactatgcctcgtgtacccgtatctttgagaaatacattttattagctcaacaaaatgaagacaaagaacatgaacacattggattacatcaattagctatgatctacagagatcagggtgattttcataaggctttaaagctcattgaagatgaagagaagataattgaagagcattttcccaatgataatctaaagaaagctgtgaataactacgaacaaggctatttgagattgaaattaaacaatcttgatgaagctcttacattcatgaatctgtcactggaacaatctttagagactgatgatgtgatttctcaggcttgtagctatagagggttaggggaaatttatttagccttggaagataaaggattagccaacacatatttcaaacgagctatagaacttttcgaaagtgttggagagtttgaagggataaaggaaattgaggaattgattaatcgatgattttgcatttagattttgtcattagtttgcttaaataaagtacataattgacatgattagctcaaaaaatttttttgttactaaagtaatcgcttcacttatcttaaaatagtttttctccattcaaactaatgcaaaataatattcgtttttcaatttctctaagtgttatcgcttgcatttttacttaaaagggatacaatgatagtgaaaaaacaaatcctttaaagtatgcgaggtgctgtatgatgataagcaagtatatcaagtatcttccttggatgatcctaggagccctcccctcctatcaatcagcaactatctatgcccgtaattcatttgacttgttctatctgaccttgaactttctgattgtgtacatcgctttaatcgtcttctacgaaaatgttctaagagacaaatgcaaagaactcttcatacgaatcatgagcaatcctaaaaaagataagcaaggataagagttgaaaagccatctgaggatggctttttcttatagattctctatttttctttgaaacattgcaaaatcggtcccgagaatgatttccttgctgatctagctttttcaagggagttttacccttaaatatggtaaaatagtaacgaaatatactagtagatatcaaataaaaaagaggttaagaatgacaattgggattgataagattggttttgcgacgagtccttatgtcttgcgtttaaaagatttggctgctgctcgtgatactgatcccgaaaaactgagcaagggtcttctcttaaaagaacaaagtgttgcaccgatcacagaagacatcgtcacattggctgctactgcagcagatgatattttaacagacgaagataaagaagcgatcgacatggtgattcttgcgacagaatctggaattgaccagagtaaggctgctgctgtgtttgtccatggcttactagatatccagcctttcgcccgctcttttgagatgaaagaagcctgctatgctgcgactgctgccttggattatgctaaactccatgttgaaaaatttccacagagtaaggttttggtcattgccagtgacattgctaaatacggaattggaactcctggagaaccaacacagggggctggagcggttgctatgctgatcagccaaaatcctcgtattctatcttttaacgatgataatgttgcccaaacacgcgatgtcatggatttttggcgtccaaattatgcgacaactcccttcgtgaatgggatttattcaacgcaacaatatctagattctctgaaaacaacctgggcggaataccagaaacggactggccttaccttgacagactttgcgtccgtctgcttccatttaccttatccaaaattagctctcaagggcttgaaaaaaatcttggataagtcagtatcagaagagaaaaaagatcaattacaatacaactttgatcaatcgattctatacagccaacgcgtgggaaatatctacactggatctcttttcctaggcttgctatcactactggaaaatgacccccaactcaaagctggggaccgaatcgccctctttagctatggaagtggagcggtttctgagatctttagtgctaaccttgttcctggttttgagcaactcttagatcacaaacgcatggaaaaactggaccaacgtacggttcttagtgttgctgactacgaacgactcttttatgaggaagtagatctagatcctagtggcaatcaagtgtttgagcctgctacgcatcaaacttttgctttgacagagatcaaggaacaccaacgcacttaccagaaagtagaaaaataatggcacgattaccaggttttgcaaaactttctcccacagaacgcatagaggccttactgaaggaaggcctcttaacttgggatgaagcacagatcttaaaagaacaaaagggacttcccctttctattgcagatcaattgacggaaaatgtcttgtcgacttttgacttgccctttagccttgctccttatttcctgatcaatggtcgtgactatgtccttcccatggtcacagaagagccttccgtggtagcagctgccagctttgcggccaagctcattcaacgttcgggcggattcaccacccaggtgcaccaacgccaaatgatcggtgagattgctctgacggatgttgaagacatggaagttgctagcaagcgcatcctcgaagacaaggaaactcttcttcagctggctaatgaagcctatccttcgatcgtcaagcgtggaggtggagcgagggatctttgggtcgaaaacaagggggactttcttattgtctacttggctgtcgatcccaaagaagccatgggggccaatatgctcaataccatgttagaagctctgaccgatcgtatccaggaactctctggtggtcaggccttgatggcaattttatccaacttggctactcgctctttggtgagtgcacgatgtgccatcgattttaaagcactgagtcgaaatcctgaggaagccattgagattgcccaccggatggagttagccagccaactggcccaagtggatccttaccgagcagccactcataacaagggaattttcaacgggattgatgccctagtccttgcgacaggcaatgactggcgggccatcgaagcaggagcccatgcctatgctgcacaaagtggttcatacaagggcttgagccactggacaagtcagccagaagagaaaaaactctatggagagatcaccctaccaatgccggttgcgacaaaaggaggctcgattggcctcaacccaacggttcaagtcagtcaccgcttgctaggggagcctactgctatcgaattagcaggtatcattgcttcactcggtttggcacagaatttcgcggccctcaaagcccttgtcaccaccgggattcaagcaggacatatgaaactccaagcacgctctctagcccttctagcaggagcgaaggaagaggaagttccccgattggtcagccaactccttgaaaacaaaccctttaatttagaaaaagcacaaacactcttacaagaattgagaaaataaaagaactaagacccacgtcttagttcttttgtgtttgaaaaatttttcttattgttttaaaaatggcaactcaggatgtttcttagtatagagcaccacttcgataaaggtccctacttggacagcaaagagcagtccgacgagaagattaatccgatggtctgtttcataaaacggagagttccataagaagtgattggctactgttgagagaacacaccagagcccaaaaagtttttccttttgctgggtcacttgagacaacaagaggaagacaccaactgatacaacagctgtatagagggcatgtgaagctaatccaccagagatccggttgatggcctcagtgacagcggctaattggctggttttggtttggcgggcaacataccctaaatcctcaatgatttgaaaaccaaagccagagcccaagcctgcaattagaatcgcttttagatctttcttgccaaccatcaagacaacccaaaaggcaactagagccttaaagaattcctctgaaaatggggccgtcaaggcatcggtccacttgttaaagacagtggcatccttgatcacatggctattcataatatcaatcaagctattgcctgaaaagctcaaccagcctgctatgaaggctcctccaaacatggcaatccataagagataggttgggacagtcaactgcttggccaatcgttttgaaaagagatagagcgggataataatagcagctaaaacagacaagtttaagaccaagtctctgcctgcagactggctaaattcttgttgagaaagatgaccgagttcaaactccaagccaattcctgcaaacagtagaaaaagatagatcgaggctctttgaattttagtcatcttgttttcctcccttttgtttctttgagcgaatcaagtagatcacaatcgctagaagggttgctccgaacaagcctgctgctaaaatgtaatcatagtcaaaatcaacgagatcaatcttttcttcataagcagcatcttcttcgtcatctagatcctgcagggcactttttccgtgttcatctgctaccttttgttctgcttcttttctgatttcttgcaagcgttcgaaggttttctcagctctcgccaagctttcctctgttgccttcttactagcttcttcaggctgagaagcaagggcgatttgttcctgatcactcagatcttgttcgaccatccactgagactccaatcgttccatttcagtacgaatcgccccatcttcgaataaatctggatacttggccacaaggtcattgattcttgaaatggtccaataccaagagcgatcattgtaatgatcccctaattcttggtaggcttgataggtgttgagaatattgccatagtagggtaggtatggagcatttcgtggactacccatcgacagccacatggtgcctccacctgcacttgctgggacatcatctttcagttggaaaatatgggcctccatgacatttggattggaaatagggtatttataaaccgcatcaaactctccttttttcggaatgccttttccatccaactccatttgatcctgtggtttatatttggttccttccaaacgattgcgttggagattcatggcatcgcggagggttaattttcgatcggttgtatgaagaaggtcaaaggacgcatcgtcatatttaacaggagagcttgggtctagcgatttgattcccgaccaaacccgagagcgatctgcttcttgcaaaggcggattataggattgagaaacgtggaatttttcatccacttccttatagctattggcttttttggcgactttttcaagatcttttgaagcgatcgtgcgttcggtatctgatagatcgacatgccctaagaagaaggtatttggaaagaccgcaaatcgatcctctgggaagagaatcgctgcatattgatggccagataggatttccatataccagacgccttctttatcggcaatggtcacaatatttccttctgcagcgcctttttcttcgacgatcttagcaatgagttcaaccccttctcttgcggttttcacactagggagaacgatactggtcaagcccgattctgcgaggccatccttgacgtagggatccactttttggatcttgtcatttgctgaagcagatacagtggcagaaatggaaaccccatattcattgaatcctgcttcgtcaaaaattccctgatcaggggtgacatctggaaccgctgtatacttatagctaatctcaggtaagggatattgaaaaccgttggcagcatcttcaaagatggctccttttttattgtagacacgctctctgaccacaaaatttttattatggttgggctctaaatcttcggtacgccctaccaaggtcgaaccgtcggccgtcagtttcttcccgatgatgaaccctgtacaagcctcaacaggttgagcaatcaacaaaagcggaagcaaggcagctacagctgatcgaaaatagtgcttcttcatcctaaactcctttttaaaaatgtttttccttatttagtatactcttttacaagcctgttttgcaagcgattccagcaaccgtaaacgattcgtaaactatcagaatttttgaggagaacactttttcaaaaaaaagaaaaaattggcttattttgtcaatcctaaacgaataggaactaatttttaagtaaaataagttaagtgattcttcaaagaactataaaagagttctaattttcaaaatgaatcataatatacgaaaactttccgccgtgagaaaagtgcctgaaacgtttttgtttcaggcactcgggagttttgaaaccttaggttcaagactaagtcatggaacttcgtagaagttcgctgacgtccgtactcacctaaggaaagtttctaaaatgatttttcttcattttttctgttgctgagcttgccataactttccatagaggagatagtcgacttcacggacctctttcaggttctgacaaccgagcgcacaaaggagcaatctgaggtcttctttccagccttggacaagggcgatcacttcttcaatactcttagtttctaccatctcaagaaaaacgcgggatagtcctacgccacgcgctccaaggaccaaggccttgaccatatcaaggggatgacggatgcccccacttgcgaggatctcaacctgatccatctgatcctgtaactgtaagagacactgcgcagttgattgtccccaatcgtccagataagcgcgattgccaccacgacgattctcaatataggcaaaactagtgccaccacgaccagaaatatcgacggttttgatcccagcatctagcgctgcctgaactgttttgggatccataccaaagccaacttccttcaggactaccggcacaggaaagccctgcccataactcttgagatggtctttccaagtgtggaaaatccgctccccttcaggcatgagcaactcttgcatcagattcacatggacttgaagaaagaggggttgtagctcttccactgttcgcaagcccaaatctggctctttatcgatgccaatgttggttgctaaaagaagatgaggatggtcttttttgactgcatacgattgatcgttcggatccttcagccctgcgctgtaagagccagtcacaaagagaatcccacaggcttcggctactgctgctaacttttgattgatctctttggcccgtttactcccgcctgtcatggcattgatataaaaagggacctcccaatcacggcctgcgaaatgggttgttagatcaatctccgctagctccacaagggggagggatcggtgaatcagctcgatctcatcaaagctattataagaggagctttgctccaaggcatagcgaatatgctggtcttttcgattttcgctcacgaatctcccatcctttcttggtaaatgacttcaatattcttttccttccagcgctctatcaaggtctgagtctcaactgggtcaaaactaagggcgattccacagtcgcctcctccagcaccactggatttggcacaggcagaaaggccttctgtcgcttcttgtagctcttttagagctggggtatagatcaaagggttcaaagactttaggttctgatccgcacgtttgatactagtctcaatttctttttggttcccttcacggagacctttttcaagattcttcactgcactctgactctcctgaagaaaatcttccttgatcgctcccttgacctgacggatcaaatcacttgaaatcgctggttccttggtccaaccaaccagaaaatcataagagatggccggctggatcgagcagatctggtagtcccaatccaggtctaaaacttgtgaaaggggctgagaagtcaagacttcatgcaaccaagtccgatcaaaggattggtaataaatcaagtcctcgtaggcaatacaagccaaatcgcccatggaaccattgtcccctctttgcaccaagaccactgctgctagtcgaaagagcaggtctggatttaagtctaactcatacagagcagccatggccttgatcacgagcaagaccacacttccgctggaaccaatcccatactttttcccctcttcgcccagtgttcctctaaggtgaaggtcaaaaggtttagggacgattccctgatctttcagccactcttccatgagctgaatggtctcttgaatcaaggcgtagtccttatttggggtcaaatccacctggtaaccaaagagatctgaggctagctgatagcttctagattcttggatagtagctgacagataaatgggaataaactgaatcacggctccatagccaggcgttagcactgcgtattctccagctagatagagcttgcctccagtctgtacctgatacttagtcttcatcttgaggatcctttgtcttagatacgatggtccgatagcgggcgtcaaataagggcaccagctgatccaagtcttcttctaaacagagaaccttaacgtttggccctgcatccatggtaaagtaacaaacatggcctgctgcgcgaagctcacggacaaagtccatagctttgtggctttcttctgtcaagtagctaaaggctggagtggctgttctagtcgtcgcatgcatagcaagggcattgcgctctgtcagctgaccgacctgtttaaaatcattgccagctagatagtccagcatgtccttgtaatcttgtcgagactcttcgatccattctttgaaattagtcgaagtctccatgcagcgtttcatcccttcccggctggaaacgggcttttgcttgtcattgaggaccagcatgatcatggctaatttcaggtctgtcttaaccttgtatatatcgccactttctttgtcccaggctgctaagggaccaaagaaagaccgcgaagaagagcccgaagcaaacttggctttttgagctaattcctcctgactcaagcccaaatcataatactgattgcaagccttgacgagagcagagaggccgctcgagctagaggacaagcctgctgcggttggcatgttgttgctggtatccacccgaacaaatcctgcttcatctgatggcttcaagccatcaatcacagctccaattttggcttgctcagctggattttggaattccccatcgatgtaaaactcatgcgcagtcgcatctgctggcaagggtgatagccttgtctctgtatacatattctctaaggtcaacgaaatcgaactggtcgaagggaccatctgtttggcatcttcttttccccagtatttgataatcgcgatattggcataggacttagcctttacaggttttcgatccatgtatggtgcgctccttctttttctaatgcatgggcaatggttgctgcttcacgagaatccttgacgagggcaatcacacagcctccaaggccgcctccgctcattttagcacctaaggccccattttcaagggcaacggcgaccaggtggtctgctttttcacagctgacccctacggctctcaagtggtcatgacaagtagtcagagcctgtcctaggctcattagatcattcatttttagagcctcttccacctgctgggtcaactgaccaatctcatggaaatgggataaaacttcctgccctttggcttcaaccttttgaatcgcctcacgggtattgccgtgaatccccgtatccgcaatcaccaaactcgcttttatacccagctccagcgggtaaaagccgatattccggatgaatttaatggcttgatcgctcagacaagtcttggcatccagaccgcttggattcatatgggcaatggtttctgctcgattgaccaggatttctaaggtctcatcgtccagctcctcttgataatagtcaaaaactgcacgaatagctgcgatactgaccgccgcagaggaccccatcccccgtttttccggtaccatagactgaatccgacagcgaatccgggcctcacgaatcccgaggtgctcaagagacgcaaaaaccgccatggacaatgtgtcatcttcaaacaaaatccatggactgtctgccgggatgatctggcagatcacttcgatatgatggagtggcagggcaatagccggataaccataaaccaccgcatgctctccaattaagataattttactatgcgcctttccgacgcctatctctttatgcatattcatctcgctctactaaggtcattactattttaatataaatcagccaaaaaagcgatgcttttgaaggaaatccaacctaagacggagtccaaaaatgaatcacccagaagagctccttcttatggacagacaagaaaaggccgggatccgtcatcccagccatccatttctatttttcacattcttgtttgatcaagtccatcaaagagttgcggtctaagatccattgggcccgttcgtccttctcataggtccggttagacaaaaagatcacagcttcctgcctctttcgattgtacatgatgaaggttccagtatagcccgtatgatccaaccagtcaccctctagattccatccgagagcgcgggtcttgccctcttcacacgcaaaattctgagacaagtcacgcgcaaaatcatccttcagataatgctctaaaaaacgctctagatctggaaccgttgaaaaaagtccagcacttcccgcatgacagcccaatactctcgcttttggatcatggacacttccagaagcaaccccacggaccgttggcaccgccttttcgaccggtccaaaccgtgtttctgtcatcttccaaggcgtaaaaatcagctcttcaaataaacgatccaagggctggtgaaacctgtcttctaaccaaaagcccaacagaagaaaattgacgtcagtgtaatgaaaactcttgtcttcttttaactgcaaattttcaagggctgttttcaactgtctcgcatccaaatgatcccggttggggataaaaggatcgagcccagaagtatgggtcaagagttcccggatggtcgtcttctcatgagcaaaacgtgggtaaagctctttaaaggggcgatcgagtggaagctcccctttcgcatacaaaaaggcacagatggtagcgactccgacgaccttgctgacactggccaaatcatagaccagatcagcctctactggctcacctttttcagggtccgcaagtcctagatagtgctcactccactgaccattgcggtaaagcgcaagagaggcacctggatagatgccttcttggatttgttcggtaattttttcgatgattgccttcacgctcatcactccattcttattcttcataagaaatatggacctgatcttgattggcttcaaaccagagttcgatctggcttggatccttggcaatcaagaaagttcccttacggtgcataaaatcgacagcgtctcccaagcgttctttcaagtcttccacatcaaaaggtgccaattcgaccttgatcatgctcaaatcccaagttaccttgttctcaacttggagatcttctccttgagcttcctgcaaatggataaagtgggcaagagctgacaagctgctatagaacttctcagcctcagcaagatcggccacattgacctcaagaaagtccacatcaaaactcgtcaaacctttgaaatcttcgggagcttctacaagaggcgctttctccaaaggttctaggctttcaagattttcttcagcatgcacgaaaatggtatctccttgaggagacacaacttcaaaggcgcgaccattagctccttggtaaagggcgcttgtttctggctggcgggccaacaagtaatcaatttcttgagcttgtgccactttcaccacgatacgacccaatttctttggaccttcaaccttacgtgaacgtatactcggtgattcttctaggacgattttttctacttttgaggcatctcctaaagataggagcgctccttcttctactaatactttcattcccaatgtctcttcataaaagcgttgattgacatttcggttattcactttcaagactgggatcactcttacgatctgatttgctgtcataacttcctccaagcactttttattgtaaaagattttctggctttttacaagaaatcttgtgcaaaaaagacagatttttcaaaaataaaaatctgtctttctttacttaatatactgttcgtgtatggacccgcccgtttggagcttcaaattcatattctaagtaatcctgataggtccccggtgcaatcactccacgaacatctaatacagccgttcccgcctgtcccacaattgaatctgctaacagacagcaattagtagacagaacaaagtaagatttaaaacgcgaagaagtaaatttatatagctcagcccctaaatcatatttcaatttgtaagcgtaggtcggctgaccgtcttccagtaacctcctaggtggatcccaaggttctaacaactgatcaatttcagctagacgcttctctactgcctgattctcttcttcggtaagggataggctgtagccaaacagcgtcttttgactctcttttttacatagttcgatgtatggttccttatccactttaaacagtacgccatccccaatcgtcccaaatagacgctctgaaaagggatcgtaacttccgtaagaaatgaccttcccctgataacaaatatctacatgcccaatcgctccaaataagttgctgtcagaagtatgaaccaaaatttctaattcccttgcctcttcttcttttttcaccaatcgataagggcctgtgtgtcccgccgagctccctttttgaagaaactggttaaaccgttttaactccttagcagggataaaggctgcaaagataaccggtaggctaatacgaaagcgacgttttaactcttggccttgttggtctttgtcaaataaaataccatctcgaatattagaaatccccaacaagaccagataagcccccaagaggataaattggaagtgcctatctgaaccaggttccaagacagttgctagaccaatcccaccgtttaaaagcgcatcccataaatagagccagcctccttttacccgattggccttataaagccaaaatgtgatcccatagacaatggcactccccaactgatatgcccctaaacaaatcacaactaagtttacgggcagactactcagtcgattcaaccagatcaacgcaagtgaaagaaaaataaaccaaatagagtggctataggaaatagacttgctacgtaacaaaaagcgaagaagaaagcttcctagtccatcaactaaaaagtaaatggctaatagatccaaggaaaatttggtgaaaccaacgccgtttcgaaaaatgagaatcccaaaaatgacggcaagaaccccaaacaataaggtccgtcttcttgcaacttgttcaaaagatatttttttcaatattccttctccttatagacgaaaggtctttagacaaatactattttatcatgtataatataagaagtaaagaacaaagaaactgataaaaggagcagcctatgaaatacaatcaatatagctatctatctgttgaccaaaaagacattcttaaggaactaaaagaaattgggtttgaccttcccacccacctcccagaaaaagaactgtttgaatggtttgtccgcaaggtttacttcacctataaagatacagattatcccctctctaacctagtggtggattctaaaacagactttttaacttatatccaatctgaccgcgaatggtcttcgaacattttttacacagtagctctccagttgctcggtttccactattttattgattttgaagatacgaccagttttttgaaagaagtccaatttccgattgagtatggaaacttggttgaaaacctctatcacctcctcaatactcgaacagtcaaagggaatttactaattgatcagttggttagcgatggtttgattcctgagaccaaccagtatcactattttaatggtaagagcctcgcgacctttacaagccaggatgccatccgcgaggtcgtttatgtcgaaagccgggtcgataccgataaggatggtctgccagacttggtcaaggtcagcatcatccgtcctcgctatgaaggaaagattccagctgtcatgaccgctagcccttaccaccaagggactaacgacaaggccagcgacaaggccctctacaatatgaatgtcgacctcgaggttaaagaacctcataccgttcaactagaagaacctcaattagaattggtggaacctgtcggttcagcccaactagtcgacgaggctgaagagctcctaacccatataaactctagctataccctcaatgactacctgctgccacgcggctacgccaatctttacgtatctggagtggggacaaaagattcgcaagggctaatgaccaatggaaattaccaacaaatcgaagcctataagaatgtcatcgattggctcaatggccgttgccgtgccttcacagatcacacacgcaaacgccaagtcaaggctgattggtctaatggaaaggtcgcaaccacagggatctcttaccttggaaccatgtctaacggccttgcgaccacaggtgtggacggcctagaagtcatcattgcggaggctggaatctcttcttggtacaactactaccgcgaaaacggcctcgtcacaagtcctggaggctatccaggtgaagactttgattcccttgccgaattgacttactcgcgcaaccttctgggtggagactatttgcatcacaatgcggcccaccaagccgatctagacatcgtgaaaaaagagctagaccgagcttctggagactacaaccagttctggcacgaccgcaattatctcttacatgctgatcaggtgaaggctgaggtggttttcacccatggttcccaagactggaacgtcaaaccccttcacgtctttaatatgttccaggctcttccagcaagcatcaagaaacacctcttctatcacaatggtgcccatgtctacctcaacaactggcaatccattgacttccgagaaagcatgaacgccctcctctctaaaaaattgctgggctacgattcaagctatgaattgcctactgtcatctggcaggacaatacaggagaacaaagttggacttccttggatgattttggcaaccaaacaagtcagcaaaccttctccctgggagacgacgaaaaagtcatccaaaaccgctacgagacaaaagattacgagcgctatggcaaggcttatccgaccttcttaacggacctctaccaggataaggcgcaacaggtgactattgacctgccaatcgaagaagacctacacctcaatgggaaagctcgccttcacctgcggcttcactccagcaccaataaaggcctgctttcagcacaactcttagagcttggaagcaagaaatacctccaaccctatcctgctgtcttgtcggtccgtacgctggataacggtcgctaccatatgctagacaatttgactgagttgcctttcaaagaagctggccaacgagtcatttcgaaaggttatctcaacctccaaaatcgtcatgacctcttagaggttgaggctgtgacgccaggcgagtggatggaatttgactttgatcttcaaccaaccatctacaagctcgaaaaaggagcgacccttcgcctggtcctttacacaacggactttgaaatcactgtgcgcgatcaaaccgattaccaactgaccattgatttagcacaatccagcctccatcttcctgaaatgacagagacccgctaatcgtggtctcaaggcttgcccttactcggcttcatttgacagcttagcctacttatgttactatctaatagagtatttcatagaaaaagatattagaggaagttatggcgattgaaaaaactgtcagcgaaattgctgaaattttaggagtcagccgccaggcggtcaataaccgtgtcaaggcgctggctccagaagatacccaaaaaaacgaaaaaggggttaccgttgtaacccgtagtggcttgatcaagctcgaagaaatctacaaaaaaactatttttgaagatgagccagtcagcgatgatgtgaagcaacgcgaattgatggaaattttggtggatgaaaaaaattctgaaatcgtccgtctctacgagcaactcaaagccaaagacgagcaactcgctaagaaagatgaacagttgcgcgtgaaagacgttcaaattgctgaaaaagacaagcaattggaccaacaacaacaattgactttacaagcaatgaacgaccgcgataccttgaaacttgaactcgaacaagccaatgaaaaagttcaagagcaagaaagcaaaggtttctgggcacgcgttttccgtcgataatctggggctggatcctaccagtcccttttcttttctagcacaggagattttccatgaaaatattagaagattatatcgcctttgatctcgaatttaaccaatacgaaggtgcctatcagatcatccaggtatctgccgtgcgttttacggacggtaaagaagtcgaccactacgactcctacgtttacaccgataagcctctaaaaagctttattaacggcctcactggcataacccaggacaagatccaaaatgctccacaactagagcaggtcctcggcgaattcaaggccttcgttggagaccgccccttgattggatacaatgccaaaaagagcgaccttcccatcctacttgaaaatggcttggatttagaagaccagtacgctgtcgatgtctttgaccaagccttcgaacgtcgtccatctgaccttcatggcattaaaaatctccaactccacaccgttgcagcatttctgggagttgcaggaaaatcacacgatagcttagaagacgcccgcatgacagctcttgtttacgaacaattcctcgaatttgatcaaggacgtaccctccttgaagagcaagagaacttctccaccaaccccttcggagacttggacttatccggattttttgatgaataaaaaaagctcaaaactgagcagtactcctagagttagatgttttcatatctttctttgggggttctttttatttcatttctgtaaagattgactaaagtaaattttcatccaacagacaagtagagctttttcaaaggcttaacttaaaatattagttattaaagatttaatcatttctaattttttaaatattcattgaccagacttattcttagatgtataatgagcatgtaaaatatatcacaaagaataatatgtaataagatttaatgattacatctgatatttctcaatcatagggttctattttctaggagagatttatgattaatatctttaaatatcttgataaaaaaacaaaatacctaaccattattggagcactggcaaatgggggtctcgcattaggtcaacctttggttgttgccaaagcactatcgatagatcaaaataaccttacctattcctctatttggaaatttgctctctttggtttttctgtctatttcgctttgtatagtctaatgttattttgtaatcatgcaaataatgtctttagacgtgaaattcacatgaatatccgaacggccctttttcagaagttaatggaagacagggaatatagtgaagatgaaaagattaccttgctgacacaggatatggaatttctaggagataacttttttgaacgctatatgtctatttcatgttggggatttggagcactgattacggcgatctatatcattgcccaaaatgttttattgggttctatctttgttttcttcacaatcttacgtcccattccacaattcttgatgaataataagctaaagaattcaggggatgaaatgtctcagggaagaacagctgttcataaccaaatctctgatagtattcgaggagctcagaccttgcggatgaatcaagccttgcctgaaaattctcagcgcgtctggaatatcaatcttcgttatcaacgagctattcaaaggtttgcttttacccataatattgttttcttttgtaatggttttatggtctttctgagccaagtactccccttggtattagggttcttccttgctatgcagggtcatcatgtttcagtggctagcctggttgctatgtatattgctgctggtcaactggtagggcctatccaaaatatcatgtatgatgtggttgaagtacaaggagccaaaacaacggcagaaaagattttcggaattttaaatcgagcagatgatagtgaatcggacaatcattcgatctcccaagtagaagagctagaaatttcccatttaagtaaatcttataacggtagagagattcttcgcgatcttaatctagccattcgacaaggcgaaaaagtcctcatcaaagggccaagtggctgtgggaaatcaaccctcttccgaatgatcacaggagaagaaaagccggatgccggaacgattacttgtcgtacaagagatggagttaaaacaagtcactttgttcgtcaggtaggcattatcagccagcatcctttcctctttaatgatactattcgctacaatctcagtttgggacaggagttttcagatcaagaattagagactgttttaagacaggtcaaactcgaccatgaactaactgatgggcttgattttgtaatcactaataacggagaaaatatttcaggcggacaacgtgtccggattgaactagcccgcttcctacttcgtaaaaaggatattttattagcagatgaggtaactgcagctcttgacgcagaaaatagtcagatggttcgagacttgattttctcactaccgatgatggtgttagaaatcgctcaccatatcgatgatgaaagtcgatacgatcaagtcattgaactaagaaaagaataaaattgctgacataaacctaaaatatatcgttagtgtttcaaagaaagaaaatactaaaactttccgccgtgagaaaagtgcctgaaacaataacgtttcaggcactcggaattattgagaccttaggctcaataattagtcttggaacttcgaagaagttcgctgacgtccgtactcacccaaggaaagtttttaatatgactttgtcttcaatctgaaaaaggctcaaaactgagcctcttttgagttaatgaaaacttccttagcttaaaatggtaatttccctgcgaaagcaccgagttttttcttggttgcagcatcaatttcttcaatggcagcattgatggcttgcaccgtcatatcagaaagagtttctgtatcttctggatcgaccactgcagcattgaaatcgatggaaacaaccttcttatcacctgtaagagttgcaacaaccaagtcttgagcagatctccctacaaattgagttgcggctaattctgcttggctttgctccatttgcttttgcaatttttgagcttgcttcatcatattttgcatattcatcataatgttttctagattcctttcgtatcaagggtttagaccctgttgcttaatttttactgcccacttctgcccatttttctaaaaatcgtcaaatgcattagcgacttctttttgttgtgatgggaacaaatgtgagtagatatttattgttgtattgatagaactatgtcctagtcgtttcatcagagtgaaaaagatataatcctttccttctcctctcctcaatccctgattaattaaaaaggcaacatgcgaatgcctaaaatcatggtttcgaatcaatttgaagtcttctggcaatcgtttcttgaatgatgctctaaagttagagacatttggagcagtcataggctcccctgaaaattggaaaatctgtaaatcatctgttgaatcagttagcttagccagcttctgactttgaattgatttccatgttctcaactcatccacaaaagctttatggatgtagatctctctatttgattgagttgtctttacagatccaatatgtgtttttccattacgataataggccgacttacggatcttgatatatccctcatcaagaaaaacatctctccaagttaaggcaagtgcctcccccatacgaattcccgtaaacatgagtacacgatatagaagtttaaaaggatattcactttcttcgaaataggactcaaactccttgaattgttcaggagtatagtaagacatttctttatgcttttctggaagtttccgaatagcatcacatggattatcctgtctaaaaccttttgaaatagcgatatcaaacaacttgtgaacaaaaatcatttgttggttaatatgcgttgctgtaagtgtgccaccttttacactaggctgttcgattaaccaatctcgatatttttttacatcttgaatggtaactgaagacatatcagcattttcaaagaatcgcgatacatattgggtatagtatgagttctgggtatctactgtacctcttttatttccacgaagctcatcttcttcttttaacattacataaagagaggaaatggtgagtttttgtgtattctgtatctgatttaacttatggatacggtaataagcctcatattcctctgcttcttttttcgttaaaaaattagatttgcggtgtcgtatacgtttgccagttaaggaacttttaccatcactaatatcaactagccacagtccatcgtcctgtttaattaccgccatgctatttttctccttcagtcatgacagcgctttgaaggttcccctcaattatatcattttttaattgtatttgaaaaccaagaatggattcaactgtaataattggtacacgtccaatacgtttattcttataccattcaaatccttcttgtacaagctggcttttagcctttcgtattaatttactagcttgtgtttcagaatatccaatcaattccattaaatcatttttatctacaacttgaatcatctatatctattcctttctaatgtccaataacataggtaaattgttttgcagtttccgcatcaaatgtacgataactaatgatccctaatcctttcacattacattctgagacgagaattgagccgtctgatttaacttgttccacaaatgaaatatgtccgtatattggatcagctccagcttgtccagggctaaatgatagagcagagtgttctgttggtgtatgggttattgtgaatcctggcttattcatccattggccaccatttcccataaatggatcaaagttgactccgacttgttttccacggttgaagacataccaggtacattgtccccaaggatatgtactagtgatatatcctgtggtatcaatagctgttgtcaaactataacctacaggtatatcatttgaagttactcctccaccatctctagtttttcctgtagtttgttcaggagcttttggtgttcctccatgttcatcaatgaatgcatccagtttttgcatggtttcagcacgtctttttcctgatccagtagtatctgtgaagtagactccaccatcagttgctggattgagtgttccattcgcaaactttttagccttatcatcttgtattttaaaggtttggtttttattcccaatgatggtttgctgggttagtccgacaacagcaatttcatcattgaagttattggcatattctggattggagtcataggctccaaacccaaacatattggctccaggattggtggccaccccagcagttccaagagagctttcatttagtgcgatcgcaacgattccacggacatcaagattagacttagcttcccattcgaggagctttttaccattaattcggttcttatcataggagattcctaacgtatctaaaaagccgtctaattgctctgccgtgataccgaagcgatgaacaagtaagttgtgagtatagggatctccatcagaccagtgatccgcataagacactccattttgggattggggtgagccatttgttcctccacctccgacagctcccataaggataatgataatgaggaccggaagaaagagaggaatgagaccagctaatagaaaccattttagttttttcatcgaatctcctttctagttaatgtcgtatataagcagtgaacaaaactgtcccaaaacgccattttgcatctagaacgactgaataggacttggcctgtaggatgatttggtcttggtcttgttctgtgactggaaataaaagaaggaaatcgactgagcgttttccttcttggtaggcctgataaagagtttcttcaagaactcttggaaaagaagttcttgagcgtattttggtattcatatcattctcctctgagttgttttaagcgttctgttaatcggtctcttcgttcaatattggctctcaatttatcatctcgtgtcatagttttcctataagcacgagtgaaggcgttcgatccttgagctttgtacatagcttgagggtctttatatccctctaattggcgttcaatactattaatgcggagttgtttaaatggagaaatccattcttctttaagagtttggaattcctcgtttgaacttggtgttggctccgctgtgattggggattccattgaaggagttggtgtttttccttcaactggtttaaccttctcaggaattgcctttgttttcggaatgtttggttcaggagtatctggacttgttggcatctcaggtgtttccattgggagcacttcatcgggttggtgctctgaatccttattggtaaagaaagaaccaacattttggaagtgactcttggcattcatcatcataccagctccaaaaccagcacctgctaaggcaaagtttccaaggtgttgagcagatgaaaggcttctagatggtacttgtgaagccacctctctggtctttgtgactcctttttcaactttgtttccaatatcactcgccaccattcgtgctttagagccaagaatgaattggatcagctcagctttgtatttccatagaagaaaatatacaagtccttttgagacaactgagatgagtagtttaaagacaagaccaaagatgatcaaggatggaagagttttaaggataccatcaaaacctgtaatgacaatgttttctatcattttttcaatatagaagactaaaagcgttaatagacttgtgatagctggaaaaagcagccctccaaacatgactttcagaactccaaaaatcagatcctgcattcttggtacaaaagacatcaatagcacaattggaaagagcaggatcatcatcaggacgagcgtttgagcaatgacgtttaacatctgaatcaagataacgggtatcgctaatacaaaggcttcacaaattttaaagatcacataaaacatacgagtaaagatgaaatctggcatagctgaaacccaacggttcttttcaccatcatcattggctccatttcctagttcatccagatatttattgcgatctttcgatttaactgctttaaagtttccattcttatcgcctgttcctaataccttactatcatcaaaagtttcttgtttcctatcttgactattcttatatttcccattttcttgacctgtattgacaaagacataggctttataagaggtttctgcaatatagctatctgccatggaatcgccaattttaatggatttattatttccatactccaccttgatattcgtgatatttttggtgacatcttgagagacatggttgatagtatcgagtagatatagaccacctgatgttccagcgattgttccaaaataaccaaagccaaggatgagaactagaaagacatgaaggagagtccttgaaaaagctcccttagaaaagaaaaactgataaaagagatagaacgctagaatcagaagcaacatcgaaacgagtgattgtttggcgactccaccagagcttgaaccgatgaatcctttccagatattcatggctccattaaagacatagttcttgtagttggagtagagatcaatcttttcaagaatccgaatcagcaaagaaaagaatcccaccactgcgtttagaatgaaaaagaagaagttgacgaaaagctcattaatcagaacccaagccccattaaaggaagcgaacccagttggctccatgtaggacttgagagagaagatatcgactccccttagtttgtcaaaagcttcttgcatgggttcacctcctaactagcgtatttgttttcaagacttgatgataccgtagctttcattggttttagaagcatatcaatatcttcaaagatattgtgtacggaaatcatattgagattgccatagacgtcatagtacagacattgaccagaaatcatgttatcaatccattcaagattgctttcagtgacttctagattgacgtgtcttaaaatatcttcccgttcagacttttcataaaaggcaaagatggtcccaaatccagttgtatcatcgtcattttctgcatcatgtacagattgagtaatcagtgccaaggtattatttttggagcgtccaatccgacgcatatttttgataacggcttttccttctgcggacttcataagaatccatgcttcatcaaagaactcaatggtatcttcattttcatttcgttctccaaagtgggtacaaaaggctccaagcgcaaacatgagggcaatagagttgcgttcatgatctgaaatttttgtggaatcgtcttttggaagtttgaggttattgacctctaggatagtcactcgtgattcgtagttaagcccttgagtagttccatctgagaaggccagttccaagatagaatttgtgacgatcgaagtcagataacggccaaccgaagcaatttcagaggaagtagagtctctcagcacttctaggacgtgcttaaagccgactttctcaccagcgacccgtttttctacaatcgcattaattgcttctgtgatcgctgttttctggtccattgtgacatcatctacggcttgtagtagaaactcaagcatgttttttgcgacctctacagcctgttctttatctagaacgacaataggatctaaaactccgtggtttgatggtagtgagctatccagtgttacaaagttaaagttctcaatctgtctctttcgttcaggatagagacgtgcgaattcaggtgagttaatcacttcttggtagtgatttctaagttcacgtttagggtcaatgtagagggtcttaacattttgtaaagccacacttaaaaagatgatctgagcaaggaaagattttccttgacctgttgcacccgtgatgatgatatgcgggttcttggtaatctttccagctatatcttctttatttcccactgtcgcattgtagaggacaatgttctttgaagaatcaatagctttatcgatatcgtcccaacggccagtccagttatctactcggccgatataccaaccgatacggtttccagaagaagtattggtgaagggcatgagctctgaaaatccacgagcagtgaccatatgtgtccaggtgcgagttttcttttggaggttttctccatagagcagcgcttgaaagagataaggaccgtcttgagaggcttcactaatttcaactcccatatcatcaaagtagttcaaaaccacttgtcgtctttgtcggagttggttcacgctagaagcagagacgataagataggctccgtattcgatgatatcctccttgtttccgactttcttcattaagtcttttagggagatggaacccatgatgatctcgtcttgttggacagtatcggtattttctgcctcttccatgatgtttctgtaacgtgtattcgatcgtcccattcgacccttgattttaccagtatcaatgaattctgctttgattcgtagctcaacgggaaagttcaagcgttggataaattctcccaggtgaaaaccattgaattgaacaggaaatttaccaaccggaagaatagttacaaaggaagatccataagggctttctagcttgaggaagccaccttttaggactttgatcaaggtatctgtgatattgaattgagcacgattggccagcacctctttcttgtagtgagggatatagcggaggtattgcatccgctggtaataaaagagttcttcattggataaccgttttgcccgaaggacagagaaggcttggaaaatagtgaattcatcacttttatagtcttcataccaggtgggacttaattcatattcatagccaaggcctttggcaattttttcagtgaactcattaaagctctcataggccaagtctttgacggtagctccatgattttgtttgcgtaaggtcactccaacgacccagtcaaactgataaggaatttccatttcatctgttagacgatcaactgtgtaaagaagcagttcttctccaagttcacgactgtcatctgctagagcatctgaaaagtcccgcattttctcttctaagagatagtctttagggatcagagatatttcaaagaacttatttttctggagctttttcatcatttgagcaacagtgattttatgtttgccctttttctcatcatccgtgattgtgatgggagtgtttggaatacgataataagcaacgacagtttgatcttttttgagagctagattttcatgtgtttccctaataggataggttaaagtaatactcatagatcctccttttctatagatttgttttttcaaagacaatttcttctacaggctctattcgatcttcatggtagatagcttttttgtttagcttaaaatcccagaagtaaatcaggtaatctccaataaagacgtgcatctttttaccgtgaggctcatattcagtatagaactttgccaatttataagggagataccaatagagtagcaatgaaattgagtgagtgatttttgcgagtggcacaaagataaacccaccaaagagtaacatggccacaaagacgatgataaagacaatgaaaaaggacaactgcatcggtgttgcaaagtaccatagtcgagtgcccttttttgtcttgatttcttggatccaataaggagcatttaggcccttactgtaatcataaagtctttcttcattcatacttaaagtcctgattcaataccgaagagtcgcaggaaccagccgactgcttttaggatatcttgtcctttcgcaatagaaacaataacggcatagaagccaacgacagagaagagttgaagccaagagctgtttcgccaagccttgatcgctaagagcacggcaatggctgtcagaatccaaattccatcgccctggaggaaggttcgtagattgtctgtattcatagagttctcctattctttatcatttgcataattcagtggaatggtgtgttctagttttgtgacatagtaggtcttttctttttctgagagggtaaaggtgaagttttctgagtgagtggttcctccgacctcaaaggttgcttggacataagcgattagattctgaccatcttttttaagataagtataatcaattgttttgaaggtggtattggctataatatccacatccttagcaatcagattgaggttgtcttggttagtagtatagttggtaaagaagaccttgaggaacttttcaactttcttacgctgaccatctgaaaagtgatcgttagcggttaattgaagctgatcgtcttcgctaaagtgtccagcttgtgaggattcaatagcagagaaccaaggaaggccagaaatataatatttcccatctttttcatcaaatggaatattgaaacctgtcacgatttctttttcttctgtgttattatcccgacggatagtctccttgtatttgatcttataggtcgcaacttttccttctacagttactaattgagagtagagaagttcactaggatttcgaacttggccctgtgctttcacatcaggaatgaagttgtaaaaactatttaagtattctacttgggcttgttgtttgtctccttcttgtgggagggtgaaataggcatagacatagtcattcaagtagtactggagtttgtagtcgtattttttactagactccattggctgtgccttttgttttttagtagcctccacttgagcttgtagtgttccaactttatttgaaagtgtgatagcacgaagagatcccaagagaccaacaaaaaggaggaaagaaattcctcctatgactgcaatattgacggtctttttattggtgacttttagttttggtgggcctccttttttctccacctttttaaagtgtgagagatattcttttgcttgaagcaagtagcgtttggctttatccatagatcctccttttagatagtagcgagttcaatgagctttgagccttttgcatagaggcgcttattggctttttcgatctcgccattaatgtaatagtagcctcgtagctcagtttggagttgttcgatcaggtcaggctttaggtctttggcttcttctttttttaggagactatttaattctccagctttggtccaagcctctctgagatccttctttttaagtaattctcccagttcattcgtgacttgagagactttcttttcaaaaatagttttagtggccatttcaatttcctttctaaatgtttcttggttttctttgatggtcttttgaatataagcaatcagtgaggggcgcattttcttatttacgctcaacacttgaccatctagtgtaaaacaggcatgttcatagttatagaaccctctactatctggaagatcttctgtacatctgcctgcacattcgtagtagaagtcctttccctttcgtaagaggatatacatattccagaattcatgttctggaagaagcagaaaatctgcttgataaatcttcttcatcatctcaagaagcctcaagcagatcatcataacctagagcttggtagataaaatctgaatcaaaccagagccagtcattaatttgtccttcggttggcgtatcaccagagaagatatcttcacatatgacggttagagtatctaccccaccacgttcacggacggtgtttaaggtcgttagtccaccagaccaagctttaaagttgtctagtgaattgatttgaactttgtattccatattgcttttcctttctagtgttcatagtgtttattggctttgagaagtcgtaacatggcttttcctcgatctgttatttctccactattttgaatcatcttcatatattctgtttgcaggattttatctgcttcagtgactagtgcaagggagttagcaacttgataggtcagccagcgaatcgttcgctcaatactgtatggttgtgggttagttgaaagttttaagggttcgactcctccaaagagacgttgccatttttcatcgggtttataggctccaaatcgagtgagaccatcatagacttggatttctttattgatgatgcctctagcgatttctccgagatctacaccattgatgtattcttccacaataccttgagctttctgatctgagaagcggagttcatagcgattccatataccaaaaatctccaaggattcgtccaaggagatgttttccattcgagcaatttcatagcgcttttcataaaagttgaagtagagttgactttgacggctcccaaaataaatggacaagccgtgattagcttccatgtcttcattatctgtgaaagatccaccacccgtgatattccatttcttaatcgtgtctaggacaatctctttggaatagagtttgtcaatcaatttgggaatttgaatttgttcgtcctcgtgaccgtaacccttatagagttcatctagagcaatatcgagtcgcttcacccgaacatcttcataggaataaagaatgttttgaagaaagatctgccaagtgattcccttgtcttctagaagcaattccaactcacggcatccttgaccggatagttgaagacaagtttggtaatcattggtcacagacttatcaaagaaatcaaaaatccagatgttccctcgttgccataagtgggtatagttcatgagacgagtttcttggtctgtaaattcgcttaagtgacagtgaaggaagttttcgcagaaagcatctaaatcctttaatctcggaaaggtcaatcggagatagtcgatctgagctcgaagactgtttttatcacaatctttatagtaaccaagtctttcttttagttctctgaacttatcaatcgtcaatcctctttcgcctgtttcataagagcggtaggttcgtgtaggaagatcaacagcttgtgcaaatgctttttgactaagtcctgtttgttttctgaaattcttaatatgaaaaggactaattttgtccattcatcgcaacacctctttctaacaaagtgacacacttttttgacgaaagtgacacacttcataaaaattgaaaacccaactcccataaggaatgaggaggggtggacttggcgtatttgccaaatgtaacccccctaattagaaaacgggggttgaagtttcatcatggcctagaaacttcgggctacggtctgcgcctgacctgcggtcaggcttgcccttgcccttgttctagcccatgatgaacaatcgtcgcttcaactgcttttggataagacctgcgtcctccctcttcaaattgagcgaggatttcaagaagaagtttttcttgaaaaggatccactagaatagcggatacagtccgttcaaagatgatcccttgttctgttaagagatagataatcttgcgtaaggttggcattttaagattttgttcgtccgcaaattctttgagtggtcgtttgtttgattcgttttctatagtctcctcttcctctataggatcaattgtttcaagcggtggtttatattcttcaaatactgagaattcttctccttcaaactccataatcggaatgttagagtaggcatcatagaatgaaaaaccttgatcaagcggtacataaggagagaaaaactcaccggccagctcgccgttgtttgcgatatagccccgtcctttgaccttgactccattaatttcatccagctttttaaactctttagtcttattagcatctccaaacatcatgtcatatcctgttgattctaaatgaccgacggagagacgcttcataaaattatcccgaagagcagttttgataaattcaccatcgggccgttgcatagcaaagatgataaagactccagcttgacggccttctagaactaactgggagaggtattccattagttctgactgttggctatagtcacgatcgatctttgccataagcgctgcccactcgtctactagaatgaattttggtttcatgtcataatgagtaaagttctttccagcttggaattttggcgaagtagacatccgttcatagcgtttttccatgaactctacactctctttaaaacagttaatgatatcttccttactagtatatacccgaccatgaaagactggaattttctttaatccagccaggtcagaattctttggatcacagatatcgacaaagccgactttagctagtgcatagattatggtcatcagaacaacggtttttcctccaccagttccaccaccgatgagaagatgaggttcttcaatataatcccaagatacatctttcatgagctggagttttgatcccttgacttttacttcatcgatggtgattcgactatcaatccgattaatagcaatttcatatttgataaagcggttatcaaaggttttatttcgaaaatctccattaaacatgacttcaagcgtagctccaaggttgaggaagcgatcttgaaatttattaccttctagaatgaaactcacttcaatcttgtagcgagactgtttgatatacacttgaggtaaggtgattttttcaatgatcttgttttcacgtctgacctttttaactagatagaggttattctctagcaaaaagcgagaaagaattcgaaggctattgagcttttgaaaaaagagcatcttcctgtagcaaactcgattgataaaccaagcaagaagcaaagaaaaaaggagcccagctcctagaaaatatccttgaggtaagggatggacttttaattcttctagatgtaagtagctgtagtaactaatagccaacaaaaaaggaaaccaccagataaaccatgtgattccctttagtttacgatgaaaaactcgaactctttttccccgataggtaaagagtttcatcctgcatcacctcctagttttccttcttattttctaccggtttgttttctttagttggtgcacctccagcttttttcttgattttagaagcaaagagcttatagatatcattacgattgacatgggtatgagtaataacaatatcttctagttcaatctcttctcggtatttaatgcccaggtcttcaatttcagactcagacatatctgcgatagtgaaaaagagggtttcatgctggacagaagagtgaatccctccaacgatcccacggatctcacctgtattgacttgtacaaatgatccatcaggatttcgttgcgagcgatccacttcaaagatgatatcaggaccctcaatacctcggaaagtcagtttcccaaggacagctgggacatccaacccgtctgtaataacacgataagttttatcagcaatttgtagtttttctccgtagtttaatccaattttagccatgtaattttctcctttaaattcttattttttgattaccaatttttcagcaaagacattgagataaggggcaacagtattgccatttagagcagtatctgggaaaaagattgggttaaccgcttctactagagaatcttctggaaagaccgttgtagaggctggtgtgatgacatggaaggctccgtgctctgcgctgtttagaatgtgacgttggtatttgccttcttttccaaaaataaatttaggagcatttcccaagcgttcatagtaagcaggaccaataaattctggtttcattttaagtgtttctgagatcataagattttcctttctgagtgtaaaataaaaagagttaagctagttgcttcactcttgagtaatagtgggtaaataatttgcgtttaaacatacgactatagaattgaatatccccatgagcatagccatttctacgagcatcatctgcgagatggtctaaatcaatttgagcttgagcataaagtttagcctgaagtttatcagattcactaaacatgccataggtaaattcgtaattatcatagagtcgtttacattgtagtgcgaaaaaagtttgtcatatcattctcctttattgtaataagtaaaaaagctactaagtgaaaaaaggaaagaacttagtagcttgagagtaggtctatcttagtagatagacagcagtaaagaaaagttatttggttggaaagatccctctttccacggtggcaacgtttagcaaggtgctttgcgtcaattaccatcgctttcccagccaatctctttaggtagtcttgatcatacccaagggattctcttacgccctttggcgaagccagttcactttactattcggaaaagtgcgaaagtccgaaatgcgtggaagcccacaagaaattagtcttgttttctatcttcacttcaaccataaaacggacttgacttttagcatcaaaacatttacaataaaggtacgaagtttatgtgttgttctgatgatcagtcctctggttgtcagacgcactttttatttaattgtcaatgatctcaattggtagggattattattttgattttcaatatcgccaccagctatatttacattttatcgctgttggcgataaaagtcaagggatttttgaaatttttttaaaaaaatttgaagaggaatggctatggcgtttgcagaacgtttaaaagaattacgaaaacaagctcacctaactcaggttgaactcgctaaacgattagggataggacaatcttcctatgcagactgggagagaggcaagaaaaaaccaacacaagaaaatctcgttaaaattgcacaaattcttgatgtatcaattgattatctagttgggaactcagaagaaaaatcagatgaactagataatattgaattgttattccgtatgaactcaagaggtttaaccgatgaagaaaaagaaatctttaaaaaagagttgattgaatttatggaaaagagaaaaaaagcatttgaagaaaacaaataaactaaaaattagcttttttgtttgataacttcattgattaaaaggagtgttttataaatggatgtaaaaaaagaatttttgaaaataatgtcagaacaaaaagaaattgccttagcgacatctgtaaacaatattccaaatgtaagaatagtaaattttgtttttgattcaatcaataatacactctatttcgcatctttcaaagataatgataagattaaggaaatgaaatcaaactctcatattgcatttactacaattccacactctgggaatgaacacgtaaaagctaagggcttagttcaaaaaagtaccaaaactatttttgaagtggcggaccagtttattgctaaagtaccaggttacaaaaatactattgaatttgcaggggaatctttagttttatttgaaatacgatttgatactgcgatcgttaccaaagatctagaaacaatacaaactatagaactttaaattaaagttccaaaaatggagattaaagtatggaaagttttgaaattgaaataccaaagatggagcattttgaagttgatgtcagaaaatcggttgattacttattaggaaacacagaaaacaaacaaactagtgatgtattagaggatattgagctactttttcgtatgaattctgaaggattaacggaagatgaaaaagcagttttcgaaaaagagttaattgagtttatggataaaagaaggaagatatttgatgacaaaaaataaaataaatatagttaatgaaaaaaactttgataaacacttttcatatcttgatgaaaatatgaaaagtagatctaataatatgatacataaaataacttgtattattgaaaaatataaaaaatatcagaagaaattaaatacagttactgaagaaaatgaaaacttaaagaaaaatagaaaaaaatgtattaagaaccttcaaaaatttataaaaagaggagagtgcatagacgaatttgatgacaaaaaattaataatagattattattacaacgaaaaggaagacaaattaataatcaatgatatttatttgtataaaaaaattctaccgaaaaaatcgttttttaagaaagaaatctacaatttaacgcattgtttatttttcgctcttaattttgtaacgtattgtcttattgcgtttactcaaggaagttcattaaatgggaaattaattttgtaccctttctttggtatatatgtaatattaggtggagtatttttattttgtagatttaaagatgatttccataaagattatcgttttgagaggttgggcggggttgaatattataaaactgaggaatacatatcaaataaagaaaataaaatattatttattgaactcaattatttattttcccagttagtactatcccaagcaactattgtccagggattttctgaaccttggattacttttatcataattatcgcattgatcactgatatatactttttcattaatattttccatgtgatatttaaattatctagagttaagggattattttttgttctttgtttaacggtaatacttatactaggatttgtaaaaaaggacacttgggttgctgttgcattagtgattgcaattatttcgttactaacttctgaagatatctggactttatatcaggatgatagccctttatctggtaggtataataccttagctaataaaaatattgttactaaaaatgttttttatttgaaacttgcagttgctactaatgtattaattttatatctttatgtgcttttttttgatgaacaacatttttcccttaatttttttaatatgtttactaacactataagtaaaatttgtgaaaatgatacacgagctaaactattcgatggactggataagctaggttttatttctatagtaaatttgttttatgttattatcaataaaacatttataaaacgtagggataccactttgttaaaggaaattatcacaccaatctcctcaataatttacaataaaatagagacaagtaaattagacctcatagataactatgacggattatctgcagagaatatcaaagagtatccagaactaataattaacaattcaaaatatatacctgaagatacaaaatttttaattgaagaacataaaagtggaaatattttaaaaattgtatatccagataaggagatagaagttattaaattaaacaatttgaaaaaaaattaattgtgaaatataaataattgtatgtggacagatgtccaccttttttatataataaactcaaccgaattggtttagttttgtattttatacttaaaggaggtatcattctttggatgaattgtatacaagaataagtaagtctacaaaacatgtgttataccagtatatgaaagatcatgacatttcattactaaattataatttcaactacttctttcaacactgtattcaagagtatcagattcaagtgattagtcaccacttctcaaatcataagattgaaggattaactgttattgatgaattaggtattagtttttcttatgaaaaggataatcccattgtgaagcaaaattttactctgtgtcatgagctaggacattttatccttgagcatgaaggtaattattttgcggaatctattgataatcaagaaagcctaatagaacgagaagcaaatatcttttctgctgtagtattaatgcctgacattgttttgttgtcaaagatttattatagttgcgacacctttcaacacattcaaaatagcctggatgtttcaaaacaggcattgttctttcgccttttagaccttcttagggaatattatcctggaaaagaaaataccattaagcaggcgatcgatgcttatattgatggacaaaatgccacactactccttttgtttcacggtgtcaaagatcagattataaaggaattcaacaactatcagacttctctaatcaataagattgagcaatcagtaattaaaaaaggcttcgttactagccaagagttacctgaacttttaaatcaggataattggaagacaattaagaattgtcatgacaatctaaaagtatggctcatctatgataaaggaaaatctatagcttatgtttgggataaaaataagctaacagacaaagaagcaaaacaaaaagctgaattgaaactactgttaatgtgaggtaagtgatgtatcaaccagaaaaactaaaggctcgaagaaaagagctaaaaatgactcaaaaagatattgctgatcagttgggagtcagctatcaagcctattccgcatgggaacgtggagtaaaacaaccatctagagaaaaagtgcaacaactagagcagattctaaacgtaccgaaaggtttttttacagagatcgaaatcgtccgactatataatactttatcggatgaaggtaagaataatgcacttagttatgtcagaggcctagttcaaaaagaaaaatgtaagaacattatttcaatgtcagaaaaactatacgaataccatgtttacgaacaaatgtctgctggtatcggttcatcggtgtataacgatcaaaactatgatactgtctattttgatgaagaactagcccacgatttcgcctcatggatttctggtgactcaatggaacccaaatatcaaaatggttctgtggctctcattcgtgagacaggatttgattatgatggtgcagtttatgccgtagtctgcaacaatcagacatacattaaaagagtttatcaggaagaacagggcttacggttagtttctatcaatccaaaatatcgagatatttttctttcgtatgatgaagatcctagaattgtagggattattgtagggaatttcttacctgttgaacagtgatattgttaatgtaaaataataatagtgtattattttttctagacagggtataagtggaagaaaagatgaataaaatggagaagactctaatggttcttctccatttttttatctaattggtaatgttgaaaatcggaagtgaaatgatactttcaaagaattcattttggacactagcaaacgaaatagagccctgatgcaaatcaacaatttgttttgaaatttttagcccaattccagtcgttctaatttaggatactgactacgtcagttccatttcaaccttaaaacagtgttttgagcaacctgcggctagtttactagtttgctctttgattttcattgagtataaataaaaatatgagttctcctcttattttaaaaaataattattttataatttttttatatttagtgtaaactattcagtgcgtcccaaatacgggaggtttgtttctgattttcatatttggattataatattctcatcagagttacttaaggagtaagatatgaaccagattatgaaacaatataaattactatatttcttgattattttattaagtctgacaagtgctcttttaatgacattcttctctctccaattaggaagaatacttgatagtatatctaattcaaatagtggattactctttcatatcactatttgtgtaagttcgattttactgtggttcttgatttcttgttcctattcctatcttaaaaaccaatatgtaaaaaaagttattttagatctaaaaaggcgtctcttattacattatttatcgcgtgaatttaaccaaattgacaaccgtaaccattcagatttcttaaataatatcaccaaaaacagtgatcttattcaagaaaatttattaatccctaaaatctctctaattgcaaatttagggagccttatcatgagtgtggttgctattatctatatagaatggcgattagcattagtctttcttttattgtcgagtataacgatttttctatcacaaattcctggaaagttaatgactaaatcaactaataattattctctacaaaataatcactatttgtcaaaaatgacaaactttattaatggttttgaacaaattaagttattaaatattcaaagctggacccaagaaaaaattcaaggaatcagtttagaatttgaagagtccagaaaaacatatcaattcttaaaagacttagcttcaactactggaattttactaagttttggctctcaactatcctgtatggttgctggtatcttttttgtaagaaataacttactgactattggactactagtagcaagtattcaattattaaacggtgtttttgctccattacaatctattctttacaataaaaatttaatcagcagtagcaagtccattattgataatatccaagaaaatctatatgagacaaatcatggaactttccataaaacaagtacaattgattgtgataacatttcgaccatttctattagccaattacattatgaaattgaaaataaaatattatttgatcatttttcctatgaatttaaaaaaggcaagcgctatgcaattatcggtgcttcaggagctgggaaaacaactttagtaaaattaatactaaactattattccaaaaatctttatgatggggaaataaaaatcaacggaaaacagaatattgatattccctcagaggagttatataaagatattgcatttgtgcaaaaaaatgattttctgattgaaggaaatgtcctagagaatatcaaactatccagaaatctttatttaactgaaaaattaagaaaagccttaggatttaatgaaggcttccttaaaaagagtctatctcaatcaggcaaaagcatttcagaaggagaaaagcaacgaattgatttagctaggtttttagtcaaaccatattctgtatatatctttgacgaacctacaagcaaccttgatccaataaaagctaaagcaatgatggactacattctatccattaaagatgcaattgttattgtcattactcatgatcaaaatccaaaaatattggaagagtttgatcacgttattaccttatagataaatggcctagtctactaaatgaatgatgtgtttctcaaagtattctttgtaatttttgtagattgttttattgaagagttcgaaaatttttaaagcttcttcgatttttaaaagtgatttttgattatgatagaatttcagttccaaatatccatctaaatacagcaaaatagtttgttcaaaaaaatctgtggaatccgctaatatattcttcgtagcctgttttaaaaataaagattcctcatataagtcgttttcaatcattataatcaaagaattgagaagtagttgaatgagagattgtctatttctaggtatagaactatacaatttcccttttttgagcgcctctttggcatatctaaataataaatctggagatagaacacgacagcaatttccaaggatgagcgtttcgtaataaccccagttttcaacagaaaataaatagtttgtaagataagaggcgtcttgacgactcaattgatgattcttatccattcccgaaacaatactttcaatgaaaatagcatttaatttatggtaatgagaatttgtcctatgaaaaagttctatttctttctctaccatatctagtaatgcttgagaatcttcattatatgcggcctgtttaacagaagctattaaggtattaaaatccgaaggttgataatgattacagataagcagaaattcctctagtgttactcctattctttcaagaagatacaataacttaaagacagaaatctctgtttctcctaattcaaatctagatatttgagattttgaaatttcagcacctgctaatgaagaaatagaaattcccttttcttctcttattttcctataagtttcacctaaaatcatatttatctccatttaccataaaaaatcattagaaagcgtgacagattatgaaaaaatactatcaaatctttttattattattatttgatattatcattattattggattatatcaataaaattaatgagtgtgtgaaaattcaatactaggagaaaatgaaataaatatttccacaataaaaagtatgatatcaagttttttggaaagcctctgtttgtaaattattttaactcacagttgatgattccacaaattgaaaagttttaaacttagcatttaaacgctcaattttaatacgtattacaactatctctattaaacttctaatcctctacagtcgatacatgctttttagaactttttaaaggaaaaaagatatctcatgaatattcatagtatctaaataacaaaaacaagtaattgctctgacaaacttgacctatactttctttaaaaagagtaaaatcatgtgtatgaccgtctcaaaaaactaattgacaggcacgaagtgtcgttaaatcgattatgattgtgtctttatggtgtatatctttttccaggataattcttactttggtttcttttaggacattgaaataggactttctgtgacatcaatagctatagtgacacttgttaattttaagttttctaagtcaaatagacttgaggaatgaagagtgtattctacgaatgttaatgttcactagtccaagaccaaaatcaaaaaactagaagatgttgagttgattaatagcataaataatgcaagttcagaattaactgtttttctagacttaaagtttttgtgcctcctcctttacagtgtttggatttataagttgtatctagacaggatatctttgttgggaaagtatcctttttgacactaataaataatttaaagttctcaggagttagttgcatggtttttcgtaaatagttttcttaactatagtatagcatagtacagtatggcactttattttttccaataagtctattataccccaaggacagctggttttaattttttctctgaactgtacgattttgcgccagaaatgtaggaattacctttcgttgtgatgtgataaaacttacaaatcttttttgttattcttgacctagttttttagaaagaaggtctaagatgttaaataaagtcaaaactaaagccttaattagtgttggagcagtggctgcaactagctttattctctgaatcttgcatgataagaagaataaagaaataaaaagaaaaatcaaagtgtttgtttatcggcaatcatcacaattcggttttttaaaataggatggtatattttgtttctttgaccaaaatttgaacaaaaaatagatttgactttcggttaataataagcttaaaagttttttgaaggaatctatttagcacaaaaaaacacctattcgagaaaataggtgtgaatgatgttatttatatccatattgttttagtgcgttattatattcttcgctatctttaagatagtagtcgtgcttaactccactaatatcaacagaaaagaccccatctttaaacgaatatccttctgtcctttttgcaatatcttgtccagttaactcaatggttttcttttgtttatcaatcttaaagttatcggcttctccatgttcaatgaaacctttatcaccttttatagtgaatgccaactcgtttctttcacttgagatccaataatactcaccatctaaagattggtagttgttttttgagcaagcaattaacgtaattattgataatgacaacaataatatgctaacaatttttctcatgtttctcgcctccttttataatattactataccaaaataatgttacaaaactgtattaatgtctgttataatggaaatttcaaataatgtccattataacagacattagtaaattatagaaaaagatctatatttggctatagttttactaaatctctacgactatagattaaaaatgtatacacctctattttacaagttcaacttaagaaaatcccaattacaaccatttaacaagtaatataaaaagagttcaattgtcaatcccttttttagataaagaaaataataatggtgctaattaggattaatacctaaataagttttaattttcttttcaagaaaatcaatatgttggttaatttcagtttgttgcttatgaagttcatcaagttgaaaaaatagtagtctaagtcgttgaggaattgtggagtctcctttatatcttaggtcagcgtattcttgcatatttttaatagacattcctgtcttttttaatctaataatgaattgagcccacgctatatcagagtcatcatagtatctacgattattttcttctctgtgtgagtaaatcaatttttcttgctcatagtatcgaagtgtgggaataggaagtccagtttttttagcaaattctccaatagaatagtaagccataatatttcccccctttattttttattattttagcataatttttaaaaaattaaaaaattttcagttttctcttgacataaagtgcgctttactatgtaaaatacatagtatcaaaggaatttgatataaagctaggagaggaggtaataccatatagacgaaaaattggtttgaaggaatagagagctccaaaggggcttagtgataaggctgtcaagaaccttgatgggagcagcgactcttataaaaaatgcaaatagcaatctgtaaaggagaaaatagtatggaacaaacgaagaattatacttgtattactggagccagtgctggtataggagcggagacagcaagacaatttgcaaaattaggaacgaatcttattttaattgctcggcgtcaagaacgactagaaaaattgaagcaagagattttgaaccattatccggatttagatgttgttattaaagttgttgatttatcgaagtccagtaatgtttttgctctttatgaaagcttgaaaaaatatcacattactacgctaataaataatgctggttttggaaattatgataaggttgaatctcaagatttagaaaagataataacattaatccatctaaacattgaagctttaacaattctatcaactctatatgtgagagattataaagattgtaaaggcgctcaattgattaacttatcatctagaggcggatacatgatggttccaaatgcagttacatactgtgcaagtaaattttatgtcagtgcttttacagaaggcttggcattggaactagaggcaaatcaacatcaattaaaagctaaggttttagctccagctgccacaaaaacggaattcggtcaagttgctacagattctaaagaatatgattatgatgagcattttgctaaatatcacacaagtgaagagatggcacaatttttgatggaattatatcaaagtgacaaagttgttggtttagttgatgttacaaattttgaatttcatcttagcggaccactacttaattattaattattttaataaatagatataatatgtattgaataataatagttgtagccattttatgacaagaaaaaagcttctgaaatgttagatttcagaagctttttgtctatctattatgatttaaaccttggtaagttataattttctgtgatatttaggatatttaaaaatatagaagtatttttgtagactaatttacaatttttccagtattttaccaagtagttcttctaactttcttaaatctccatagactgttccgtccatataaagattgtaaacctcgtcatcttgctcaacacgtatttgtgcagaatatccttttgacagtgctaaggaacgaataacttctcgttgagttcgtccattaccttctcggaagggatggaaataattaagattatcaagaatttttgctaattgtttaataatcccatcttttgaattagcagtttgataataggtatgaataaggcggtttatatatacttgggcagtactgaaagattgtattgacataaaaggattcccattttttgagatattcaccttgcgaaattgccccgcccaagcatagacatcttgaaataaatatttatgaatggctaaaatatcactaatggaatatacttcaatggttttcaagcgcaagtctgcaagccttttagtaacgaataaatgctcattccgataggcttcttcaatatttgtaatattttgtttgttgattaagactgtagaatttggataggtatattggtgattggggtcaatgtactcatagccttcgtattgatttttaaccaatattcaattcctttcgtttgttgataacataagtttttaaatcaatcacatcttgaacagtaggttcataattttcaatcattgatgacccaatagcataccagacggtatcgaaatctgaaaagttatcaaagggaatccctaaaattgttaattcttctttatttacatcaagagtcatggcacacttccttgtataacgttatctttattataccataaaatcggtatttttacctaaagggatagagaccaaaagatatatgtaagcgtatagattaatacttatgaaacggttgtaggaggaaaatctctcctacactattacagagaaatttctaaaagggatagaaaacctatctgggatggtcgtatctatttttatcatttaaaaaacatacttttgttaatactaaattttataatataatagatacaatgacttttaaaacacttcttccctatccataggtggatagggtttttcgttgttcattacacgttctaaacattcaatactagatcttaggtgaaacatttcatgtttcctatatttttcatcctgtgagtttaatagttcgtttaggtgacgtctaatatgccaaatgacttttctaatatttgcttcttttaaattattcatgaatccattgtataataaaatataatccaatttctttgattaagctaatttacatgaaatataagctattcggttaagaataagcttaaaagttttttgaagtaatctatttagcacaaaaaaaacacctattcggtaaaataggtgtgaataatgttatttatatccatattgttttagagcgtttttatatgcttcgctatctttaagatagtagtcgtgcttaactccactaatatcaacagaaaagaccccatctttaaatgaatattcttctgttcgacttgcaatattttgtccagttaattcgatcgtattcttttgtttgttaatggtaaagccgtcggcttctccatgctcaatggaagcattatttcctttaatagtaaacgctaactcgtttctttcacttgagatccaataatactcaccatctaaagattggtagttgtttttagagcaagcaattaacgtaattattgataatgaaagtagtaatatacctattaattttctcataatctgtgcctccttctataattttaattataccaaaataatattacaagagtatgtcagtgtctgttataacggaaaaatgaagaaatgtctattataatagcaaataataactttcgggaaatctgatgaattcaaaaatgaaattgatacaaatttggttatttttaataaatctaaatacccgtttatagttcacttgttgtccaggtaaaactaaaaggatttagtcatgtgaaatacagaactaaatcctttggatagcctatttgtctatctttttggggtcagtataaaatcctcccctaacaataaattattattttacaacttttattacaaatattgtgtttttaatcattaaatataagccaactatctattttatctttcggtttttcccaacttgcaataacacgtattcctttcatttctgtactggaaatacctaattttcctccttttcctaataaatataatgtatattgcgaatcagtatttgcttcataagaacccttgataaatttttcatctgtactaactttccaagcatctaatctaggaatactaatttttatatctgttttttgagcagctatatccaatgatatttctccttctttaatttcccttatgcttacttctttattttcttttaaatctatttcccctgactttgctatgattccatctttagatactacaaaaacaatagctttgtcttgtttttctttgactagatcttttggaaaataaaatttttctccatttgttctattcaaaatacattttttccccatcgcaatacccactgtatctattttttcttttgtttcattttttactgtaaatgcaacatcaatatcatcactatttctgttcatgtaaaagaataaaccacaaatgcacagtgctataaccggtactaataaagcaatcttccttttcatcttaacacctcccttatagctgacttttcaataatataattcttatgtgctactttttcaaagtccttatcatgacttacaactacgatcgtcttaccttcatcatttaatctaataagtgtatcgattacaatttttttattctcataatcaagagaacctgtcggttcatccgccaacataatttcaaacggttttatcatatttcttgcaagggctaccctttgctgttctccacctgaaagttcataaaccttcgattttaatttgtctgaaatgcccattttattcaaggcagcttctataagatttttcttatttttttcttgattgtatttggcagcaagcatcatattttcctcaaccgtcattttttccaccaaagcaaaattttgaaataaataagcaattttttctctgcgtaatagctctcctactttaggatcttttataggatctcgatttgaaaaacaggttacactaccactatcataattttctaatgtcccaattatattcaaaagtgttgtttttcctcctccacttttcccaaagatacaaacaaaatctcctttataaatatccaaactaatattttccaaaatactgtgttccccatatttcttagagacatttcttaaggttatttgcaattccttttctttttgcatttaatacccctcctttaacctaagtacaatgcttctttcacttttctttagttgtaaaatttctatgccaaaacatataaggcttccacaaatacctattattaaactaatcaaaagtttagacatactccaaccatctcttggtataaacagtccaacatcacttattactcctgttaccataataaccataaataaaataataatacttatgatataaccaacgatattttcaataattttcttatgatgtatatcaaaaaatccatatcccaacaacctagaaacatctattcgttgtccatgattataaaaatatgtttctttatctatttttaataacgttgctaaaataacaatagataagacaagaccaataacatatatacttgcctccatcttatattcgtctattcttgaaactatatcatcgtagactgagctgatatagagtataaacggctcagattctgtttcttcaattatgtccttcaaactctcgtatcctctactaggctctttgacatatggatgtagctgcccatttactaaagatgatagtttgattccataatctgggagtaattctttcccatttactgctaccaaaacataatttttcaagtttgcttcatcaattcttttgccactatcaaaagaaaatacactttgattatctttcagccttacatatgtttctgtaattgtaccttgtttttttatattttgaaaaatatgatcttcatgaattttttctttgtcaaattcagtaattttaacatcttctggaacaaaaacaatccactcattttcatgtattttatattgttctattttattcgtatctttatctaagagattagcaatatgtaaataatttttatttacataggcataattgccttgaaacggttgttgatttagatactcctcatcatcattcattccctcttttctaacgtttggggcattaaataatattgctccactatcgtccaaactattccataaattattcatctttggaataacaatctcatggaacttatcatcatctttttcataactccaagaccatgcacaagccatatttgcataatattttgagctttcccaagttggaatgtattgtttcatactcgagtaatcagcgagtcctaaaatacttacaattgctaaataaagaaccataacaatcgaccctgtttttataagaaaagaacttctatgataacttcttctataacctttcaataaggtaataacattaattccttttaatttgagataaatcaatataaactctattgatattagcccccctattataaaagcaactaaaataagtattgttttcattgatatcataaatcctaaaatatcactaggagcaactaaatattctataattccaatcgtcagtacaagtcccactattgctggtattgcaagaatatttaaaaccttagaaatagctaaagttaatttgtcgtatcctagtaaaattgatatcgataattcctttgaaagcatcccattataaataattagacaaaagacagtagctacaaatataataaaaaccgtaagcatatatagatatgcttgtttctgtgtgaattcactagaaacagtataatccggattaaccacgacctctgtttttaatttttcattttgatttatttcttcaataaacttattaatatttacttccgtacctcttacatgataatccccattaactttttccttgctgacgttttcaaaaggaattaagcttatatcttttgacgtgagtaaactcattgattttacattctcaaaatcattcaatttgtctttgctatcagcaatagatatatctctaaaagatttcttgaaccattcagaatcatttagatgaatgtaaatctttattttctgtttatcaaatctactattcttaggaatatattcttcctttatgaagcttaaatcatttttattggcgattttctgcaattcaattattgttttatcagctatttctggctttgttacaatgtttacagtagtattaaactcttttaagaatatatttaaaaacataccgtctgaatagaaaaactttcctataccaatcactataattagtaaaattgccagtatacccactgtttttttcattctgcatcatctccaactttataaaaataacgagtatgagtaatgccacaatactaaaataacaacgtggcaccgctcaaactcgttcaactatttttatttattgttatttaacatcagcccaagctctattaccacttgaagctttttcccaagaagcttctgctctacttccagctcttgtccaacccgaataagagaattgaccaccagcgccttgtactgtagttttatgtgttttattattgtgatcgtatttagaccaaacatagacactacctacaccatgtctccattttccacctaaaaaacttttccatccgctatcataactgaacaaccttggcagagtataatcttcttcaaatacttccacctcataaccaagaccttcaacatatggtaagtttgttttttctgctgcaaatgctggtacgaatgatactaacataaaacctgttaataatactaatgacaatgattttttcatgataaaattctcctctctcaaatacttaaactttttgtaaaatttttcttccgaataaagttttcaaaaactctactcaatctccgttcctatacctatgagaattattataattcataaaactccacctccattttatatatttataatcacagatgatgattcaaattaataattccattcaaatataaaagagctatccttatttatattatagaatagctctttgctttatacttaacggtatctttaaataattcttgcgttttctttgcgatttaatttaatatatatggaagtattactttagcacaaactcttttattctcctctccaatttcaaaatttccacccaagtgttttacaatgtcacttacaattgtaagtccaagtcccgatccattattgcttattcgtcttgataaatttcccctataaaactttgaagtaaccatattccaattcacatttaaatttggagaaacatcgtttataacacttatttttaacattccattaatttcctcaacctttatatttatgcttgttcctttcacagaataattaactgcatttgtaatcagattctccattattctaagtaaaagttgtggttccgttttaatcttactgttttccaaatttaaaaactccaaaattaaaagatgatcttttatagataaacttttttcttcttcccactggctaaaaaaaatttttatatctacatccgttaaatttagtggaatttcatttaaattgaattttaaatatgaaaaaaaatcttcacttaaacgatttaaatattttatgttctcatatataacatcaacaaacttatttttttgttcttcagaaagatttttttcgtcttttaatagtgttatataacctatcatattcgcaagaggagtttttatatcatgagctaaatacgttagcagatctgttttttctttatataccagttcatactccttttcaagttctttattgtaattatgaagttctataaacaaatctcgttcctttgataatgactcatgaaatggtattaaatctttatcttcacttttaagataattcagtccagactcaaaatattgattatatacataaaaccttttttcctgtattataaatgtccctatcaatatagcaacagcccctagtaaaagtattatatatttacctatttcaaaataaaaggaagcaaatttatctaatggcaattctggatctacactgtcaacaaaagaattatccattattttgtaaataatgaaaaataggattgtacttaaaaatatccatagtatttgataaataataccttccacaaaaaaacggtttttcttacccattgattttataccccactccccaaacagttaatatgactgattttaacccaatcttttcaaacttacttctaattcttcttacatgaaccataactggattaacttcattttctagcaccttatcaccccatattttatagtgtatatcatccatattatacactttaccaggttcttccataagcaaccacaaaatatcaaattcttttggtgttagttcaatctctatattaccatagtaaactttatgtgttttaatgctaatctttaaattattaacttctctatcacaattaattgtatttacaatattttttgtaaatacataatttcttctaaaatgagaattaattctcgcaatcaattcagatggttcaaacggttttacgatatagtcatctgcacctatattcaatccttgcactctatgaataggatcttctaaggcagtaagcataatgattggcatagtggacgtttctcttatctttttgcatatttcaaatccatttatatcaggaagtaaaatatccaataatatcaagtcatatttatttttttcaaattcctctaacgcctcttttccagtatgaaaaatgctgatttcccaattctctgatattaaatacatccttataagctctgctaagttagtatcatcttctacaagcattattttcatttcagtcattcatttccaccctccttaaaactacatacatcatttggagtacattccaatgcattacatatttttgccaaatttttaaatgtgattggcttattttttcccatctgttccatgacattagttgtaatctgtgtaataacaataacttctgttttctttaatccctttttggcgagttgtatccacaagggtttataatttaatgctatgccgtttcctcttttctttagatataatttttatgtgtattataccataaccattgggtacactcaatttttatttgaggattaattttgttctgaaattttaattataccgtcatatattcattttgataattaaatagtaaatattatatgattagtatccatttagtctgaaccatctcttctgataaaattaacatatctactgtatttgataaatatattcaatacatcaatctacgtgattataaaattcattttatgatctcgtagaagtgcaccaacaaccaaagggcgctagccttcaaattttcctcacaaaatgtgtccaaaatattgacagaattccaatatcgagcattttttagatctatccaatccaacagtcacgaaactattaaaatcgatggaaaaagaaagatggatacttcggaaattcgaccaatctgatttgagaaaaaaattgattggattaacagaaaaatcatttatgctactatcaaccgaaaataagtaattccaagcaagttcgaataaaagcctagtcaatttaaaataccaaataacaccctatatattagtgtctttttagaggctactagattatttatttatcaaagtgatatcatttaaaaaatacatagcttgtataactgttacatattatctatatattctatctacttctagtccacaaacatataaaaaagaggcatttaagcctcttttgttctccttcaaacactctgtcactgtccatttactgtccaatataatgtaatattattgaatatcgttattttttttgaactctaaagcctttaaaatcaagatttctaatgatatcaagacctaaagaatcttaaattaagtcttgcatattcatcatagtaatgacattccttccaacttctgaaatttacagttcattataccattttttagacacttggaaaagctttggatagtaatcatgaaaagcttctttcactctagattgatttttaagctttcactacaaaatgaaagagacccttcttgagcctctctcagaaaataataaaatgtattaggataaaatcatcgaagccacaattggactaatgaatacatacaaaattcctgtgatccctattgccaatcctgccatagcaccggccacatgaccatacttaaacgctgtccctgttcctactgcatgtccagttcctccaagggctaaaccaatagctactggatcttttatttttaacagtttcaatatcgttggacccaagacacttgttaataatccagttgctacaactaccacaagagtgatggtcgtaattccttgcattttttcagtaatcccaactgccattgcagtcgtaaccgattttggaaagagcgaaatggctagaaagtacttcattccaaatgctttcgcgatcaaggctgtaaaaatcgtattcacaataaccgctactgttgagccgatcaaaatactccgtgcatgatgcttcatcaaatggaaacttttatagagaggaatccccaaggcgactgtcgatggtccaatcaactgatttaaaagggaaccaccgacatagtaatctttataagaaattcctgtaatcattaagaataagataacgattactgtagccactaaaagtggcgttgttattggatggggatatctgcggaaaattaacatcccaatcaaataagcccaaatagataagacaatcccaaataaaggattactcgcaaaattagccatgcttgcgtcccccttctggataatcaccttcaaaacgattttttataaaactaaccacgattgcaattaaagccacattgatgaccaaggctccaactagaatcaaaataatcggaaacagataaggtgcaatcacatgaaacttatccataataccgacagcagggggaagaaacagaatcgtcatgtttgctaataaaaaatttcctaccatattgacgtggcgcatgcgtagtaacttaaactgtaataataaaaataggatcaacagtccgatcatacttccaggaattggtaagtgcaacccatccgaaatgatttcaccaattaatgaaatcgtgaatataatcgtcagttgtacatataatttcatcttcatctccctttttatggatcatttccaataaggattcgtatcctcgcttctgcttacttagaagtaaacatccatttatccctatcagtttactccttttcggaaaatttgcaagcttttttctaaaaaaataaaacaaattaccaaaaattgaagctactattttgattcatgacatccattttatgatacaatgaaaccaaaaacggttaagttaccatgaaaggatctacatgactcattttcacaccattgtcatcggtggtggcccagcaggtatgatggcgaccattgccagcgcctcttatggccaacctacactactgatcgaaaaaaataaaaggctcggtaagaaacttgctggtaccggaggaggtcgctgtaatgtcacgaacaacggaaccttagacgatttgatggccggtatccctggaaatgggcgcttcctttacagtgtgttttcccaatttgataatcatgatatcatccaatttttcaccgataatggcgtcaagctaaaagtcgaagaccatggccgggtctttcctgctagtgatcaatctcgcaccattattcaagccttagaaaataaaatccttgagcttggtgctagcattgccaccaactgtgaagtggtctctgtcaccaagccagaagacatcttcatcgtcaaatcatctgaaaacacttggacagccgataagctgatcgttacgactggaggcaaatcctacccctctaccggctctactggctacggacacgaaattgcccgccactttaaacacaccatcacagatctcgaagcggcagaaagtcctcttttgacagattttccacacaaggccctccaagggatctctctgacagatgtgaccctcagctacggcaaacacatcatcacacacgacctgctctttacccattttggactttctggccctgcagcccttcggatgtccagctttgttaaaggcggtgaaatcttatctctggacctccttccgaccacttcttctcaagagttaaaagactttctagaagagcatcgagaaaaggcgattaaaaatagtctcaaagttctgcttcctgaacggttagctgatttcttggcgcaaggattccctgaaaaagccaagcaactcactcctcctcagacagaagagctcattcaaaagatcaaagagctgcccatccccgtcactgggaagatgtctctagccaaatcctttgtgaccaagggtggtgtcagcctcaaagaaatcaatcctaaaaccctagaaagtaagctcgttcctggactccactttgcaggagaagtcctagatatcaatgcccatacaggcggttttaatattacatccgccctctgcaccggttgggtagcagggagccctcattactgatagaaattcactaactttattcttcatctattgaaataaaatttttaaaaattctttacaagttagtatttacttgatagaatggattggtataaaatttataaaggagattattagaatcatggattttgattttagtgttaaactcttttcagagtttattggaacggctttgctgcttatcctcggaaatggtgcagttgcaaacgtcgaattaaaaggaacaaaaggtcatcaaagcggttggcttgtcattgcgatcggatatgggatgggagtaatgattccagccttaatgtttggtaatgtttcaggaaaccacattaacccagccttcactcttggacttgcagttagcggactcttcccatgggcaaatgttttaccatacatcgttgctcaacttcttggagctatgtttggacaattggttgtcgttgcgactcaccgtccatactacatccaaactgaaaatcctaacaacatcttaggaacattctcaacgatttctagtttggataaaggaactcctgaatcacgcaaagctgctacaattaatggctttatcaacgagtttgccggatcattcgtccttttctttggtgccctcggcttgacgaaacatttctttggtgctgaggttgcaggtcttgctcaaaaagctgctgctgaacaaggaggcgtctttgatgctaccacatcagcagcaaaattggctttatcacaagcacacgcttcaggtttaggaattgctcacttggctcttggtttccttgttatggctcttgttacgtcacttggaggtcctactggacctggtttgaaccctgctcgtgactttggtcctcgtttggtccatgccttccttccaaaatctgtattaggagaacacaaaggggattctaaatggtggtatgcttgggtaccagttgtagccccaattcttgctgctatcttagctgtattattgttcaaagttatctatcttcgttaatctatcaaaaaaaacgaactcgattttccatcgagttcgtctttttattgttctttggttaatgaaaaacggaaatcattgtatttggtgtagtcaaatggtgtattggtagccgttgtgaaaacaatcggtgtatagtgtccttcttccaagataaaaccaggttcgagtcggaagtcagcgacacccagacctgtgatccctggaagcaaggcatcagccccatccaatccttctgaatcccaatagtagatattgcctgttgcttggacggctcttgctgtataggtcgctgtccgagttggttcgctatcatttttgaaactaaccactgttgtcacatttccattggcatccacagtcattttaatcgcatccgcttgtggactagatcctacccaagttcccaccaattctgcagggacagtagcttgcgtcgtagtagacgcattctcggtcttaccagagtcttttgaagctgtcgcgctactggcttgagtcgaagagctagctgtatcgtttgcctgagaggaagatgctgcactctttttgctattacttttggcttttttctctaccttgctggtagatacttttgcggatgaggaagctgtctttttatcctttgcaccacaaccaccgagagctagaccaagtgaagcagccaccagaacagcggcactccaacggaagattgattttttcatacgatcacctctttatctttctgactcccattatactccaattgttacaaaaatcaagtttttttgtaacaattgtaatttttttgtaacatatttttacatttaaaataccaatcgtaatagggcgatcaagacaattccaaacaaaacggttcccataaggtttttgtaacgaaaggctacaaagagactgggaatggtcaccactaggtccaaccagtggagctgcgggagacttccaatttttccatctactaagcttgataaaaccaaggcaaagataatggaaatgggcaggtatttgagaaagcgggttacaggagccggtagtcccttgtatttgactaagaggaagggcaagatccgaggaatccaggtaacgagggctgaggccagaatggccatgaagatataactattcacgcgcatcacagaccacccccacaaaacagccgatcaaggtcgcagctagcacagctagcggttgcgaaacaaaaaagagtaagagaaagaaactcactgctactgctaacagcaccatgagcatggttttggtcttttctgtcagttgcattccttgaaactgggctgcaaaaatcccaataaacatagccaccaaagcaaaatcaagcccaaaagcctttggatcaggtaggagagatcctagagctgttccgataaccgtcgcactgatccaggccacatagcctactagattgttcccatgcatccaaggaactgtaatggtgtccgtctttaatttctcactcaagtagaccccataactctcatcagtcaggagactaccaatcccaatggtatgagcgagactagcatccttaaagtcagacgacgtatgcagactcatcaacatattccggagattgatcaaacacaccgtcaaggccatattcaagatcgaagaatgggccgcaatcagagagatcatcgcaaactgggccgccccagcatagaccaatacactcatcaaggccatctctaaaggagaaagatagggagacgccaccacaccacaagccaggccaatactgatatagcccaaagccgtcggtagcgcgtccctcaccccctgccaaaaatctttttccactctcttactcctttccaaatcattgacctctattataacacaagaaaaaaggttgaaaaacgagatctggtatagaaaagataacctctcattatactcctatctctacctacttatttacttttaaatctgatatctctaatgacatcttttcttcttgtgtcatggtctcgacaatttgtttttgctcgcttgatattggcaaggtcaaaatcgtagcagattgatccggcaatgctccactgtcactaattttatagccaatccgtttattttgatatatgaattgcccatcatatttccaattcaatgaaaactcaaaatccttatcaatttgaaatccagctttgttaatcaatagaaaaacagcatattcttgttgatttgatgaaaaagttgctccagtaaagttgatcgataggcttccttgatttccaagttctggatgttccttggttaatttcttccctaattcaattacatttgattcttttccttcatactgtggtcccaccacaaactgcaagcctttttcatttttaacagttgaagactcttttgagatctgctccgttttgcttggcgaagaatcttttgattcctgtcgagactgggcgcatgctgttaatgatagaagcgctacaatcaaaacgatcgtttttttcatcgtttctactctttttttcttattcattcaattctaattacttttttcaatgattatctcttctacactatcaagccttaaattccctgttttagctcctaaaagaactgggactttaccaaattcaaaggtcaatagaaaagccgtaagaataccgcctatcaccaaaaagatcccttctgttccattattgatgaataaatacatggctaaacaggccagtaagacaacatttaatagatgggtatcaaaaatttgctttctttctggtatcggcttgaaagtcaccctgtatctcttagtcgctgtaggaaatagagtcttaacctttttacgagccttttctagagaaaatcgaaagagcgcaaatgatataagcatggcaaccatgaataagactatctttagaaaaatttgctgactaatagcatactcactgaatagattttctaagagtctataaaccactccaacaaatggctggactataatggctgctgtccctccttttattttattgatcggtgtacctggaattgtaacatttttatctacttccatcatctcaacagtgatagtttccgttggcaacccccaataatagagcttgggcttcatagtactagcatccaaaataaaatgtttaccatcatattctaccaattggtgacagaagatacttgtttccttatattctaacatcctattgacttcctttcgtttcgccttactcccacctcagttttattccctctatcataccgaattttcttgctaatcgcaaatcccttactagttggtgagattccaacaaaaagccatctggatgccttcatccaaatggcttgtgtccacttattcgattccttcaaaggccagacttggtttggcattgaggtcccagcctgcgaagttttctttgttccattcactaacgctggcataggcaatcatccctgcattgtccccgcagagacgcagaggcggaatgatgaccttaacatccgtgatgtcagaagccaagcgttcacggagaccttggttggctgcgaccccaccagcgacgactagagtcttgaccggatatttctccaaagcctttttggtcttggccatgagaatgtctaaaacggctgcttggaaactcgctgacaagtccgcattggaaaggctttctcctttttgctgggcattatggtgcaaattgataaaggccgacttaagccctgaaaaagaaaattccagattgtcttccttgatcatggcccgtgggaaatcgtagatatcagatccttggtgggccagctgatcaatttcacgtcctgctggataggtcaagcccatcacgcgcccgaccttgtcataagcctctcctacagcgtcatcacgggtctctccgacgatcttataatctcctgcttcactgacgtagaccagctctgtatgtcctccactcaccagcaaggctaagagcggaaactctaagggctccacgctttgagcagccatcaagtgccccgccatatgattgacaggaatcaaaggaaggccgtgcgcccaggcaaaggccttagctgcagccaagccgactaaaagagccccaaccaggcctgggccgtaagtaacggctacagcagtgacctcgtcttctgtgatccctgcttcttctagggcttcttcaatacaagcggtgatgacttctacatggtgacgggaggctacctcaggcaccactccaccaaaacgcttgtgactttcgatttgactggcaatgacattggacaaaagttggtcgtcatttttcaagacagccacgctggtctcatcacacgatgtctcaaaagccaaaatatatctatctttcattcgggttcctcttcatgatcacggcatcctctatcggatcgtgatagtagtttttcctccgtgcaatttcttcaaagtgcatttttttgtataggccttgggccggttgattggacaggcgtacttctaagaaaatctctttttggtccggcaactgcgcgagtaactgctgggctaggcctcggccttgaaaggcgcgcttgaccgcaatctgcaagacctctgcttcatagagagtctcttgaatggccacaaacccaaggacttgtccctcatccacagctaggaaataggagatcgattcctgctctaaatcggcttggatctgctccaacttccagggactagcttcatagacatcttccatcacagagagaatagcagctgcatcctgaattcgcccctttttgatttctactttgatcatagacgcttgatgtaggaggtcgttgtttccttgtggtctttgagccaattttcctctgcttcgacccgtttgagataattgggaacaaaatcatggaggctagcaggtacttgtttgaggccgagacgtccgattttcactgcatccggcagggtttcagagcaagtagcgcttgggaggctagaggcaatctgctccttaaaagccgtgacctctccgacaaaggtgacctgctcactcgttgctgcacgctctaagacctcttcaaacggaaaatacccttcaggtgcgaccagctgatcttcttggtaaaaacccgcatagacgttgtttcgacgagcatccatgacaggtaataccaaaccttctagatcatccggcactagagctaagaggcttgagaccccgaccaattcaatccctaaagtatgagccaatgtctttgcggttgcgactgcaatgcgcagtccagtatagctcccaggaccttctgccaccacgatgcggtccaactccttgggtttcaagtcgatttgttgcatcaaaaaatcaatgactggcatcaaggtgatactatgattctttttaatagttaatgttgtttctgcaagtagagtctcatcttctaaaatcgctacagaaagagccttactcgaggtatcaaatgctaataatttcatttcctactcctcttgaactggattatattatactacaaattcccttcaaatcccagcgaaactctcccttaaagcgaaggattttcatacaccagaccgctcaaaagcttctctattataggtctttgcccctctgacttttccagtctatcttttacttacaggcgaatttatgatataatgataattaattgtatcgaatcaggtccactagttgcgagtagaaaactctagtgattgcactccttcgcagctaacaaatggatcgaaataatgaaaggaaaattacttcatgatttacaaagttttttatcagaaaacaaaagaacggaaccctcgtcgtgaaacgacgcatgcactttatctcgatattgatgcaccaaatgaacgcgaaggacgcatccaagctcgtcaattggttgaagcaaacacagatttcaacattgaatttatcacaccactttctgagcaacaccttgcttacgagaaagagtcaggtgcctttgaactaacggagtactaatccatggcctataccttaaaacctgaagaagttggtgtatttgccattggtggacttggagaaatcgggaaaaatacctacggaatcgagtaccaagatgaaatcatcattgtcgatgccgggatcaaatttccagaagacgacctccttgggatcgactatgtgatccctgattactcttatatcgttgacaatattgatcgtgtcaaagcggtcctcattacccacggacacgaagaccacattggtgggattcctttccttttgaagcaagccaatgtccctatctatgctggacctttagcgcttgccttgatccgtggaaaattagaagagcatggccttcttcgcgatgccaaactctacgaaatcaaccaaaacactgagcttcaatttaaaaatcttaaagcaaccttcttccgtaccactcactcgattccagaacctttagggattgtgattcacacccctcaaggaaagattgtctgtaccggagacttcaaattcgacttcacacctgttggggaaccggctgacctccatcgtatggcggcccttggggaagaaggcgttctctgcctgctctcagactcaaccaacgcggaaattccaacctttaccaactctgaaaaagtggttggccaatccatcatgaaaatcatcgaaggcatccatgggcgcatcatctttgcttcctttgcctcgaatatcttccgtctccaacaggcagctgaggccgctgtcaagacaggccgcaagatcgtcgtctttggacgctccatggaaaaagccatcgtcaatggaatcgagcttggctacatcaaggtccctgctggaaccattattgagccaaatgagatcaaagactatgcggccaatgaaatcctgatcatgtgtacagggagccaaggagagccaatggcagccctctctcggattgccaacggaacacaccgccaagtgcaactccaaccaggagataccgttatcttctcttctagcccgattcctggaaatacaaccagtgtgaacaaattgatcaatacgatttctgaagcgggtgtcgatgtcattcacggcaagatcaacaacatccatacctctggacacggggggcaacaagaacaaaaactcatgctccgcttgatcaaaccaaaatacttcatgcctgtccatggtgaataccggatgcagaagatccacgcaggacttgcgcgtgattgcggagtagaaaaagacaatatcttcatcatgagtaatggtgatgtcctcgcccttacagccaactctgctcgtattgcaggaagcttcaatgcccaggacatctatgtcgatggaaatcgcatcggggaaatcggagctgctgttctccgtgaccggagagacctttctgaagacggtgtcgtacttgccgttgcgactgttgacttcaaatcgaagatgattctagcaggaccagatatcttgagccgtggtttcatctacatgcgtgaatcaggagacttgatccgtgaaagccaacgcatcctcttcaatgccattcgtatcgccttgaagaacaaagatgccaatatccaaaccgttaatggtgcgattgtcaacgctcttcgtccattcctgtacgaaagcacggaacgtgaacccatcattattccaatgattctcacaccagatgacgaaaattaaaaaaacaaccagttgagactactgtttcaactggttttattgttgcattttgaagagcaaagaagaggctgagacaaaagtcctagcctcttaattgtttttggattgttgagcaagacgcaatggttgagtgggctttactacgctgatttcatcagcttttacagccctactcaactgtgcggaggtgagacgacgaaatcgaattctaacgaattaccgatttctgtcccactctctttactcttgtttcttaataaagatctaaatagttatctacttcccattgagatacgaaggtcgcatagcttgcccattcgattcgtttggcttcaaggaagctggtgtagatgtgctcacccaaggcagctttcaccacttcgtcttctgtcaaggctttcaaggcattgtgaagggtagaagggagatctgtaattccagctgctctacgttcttccggtgtcatcacatagatattttcttcgatcggagcaggtgcttcgattttattttcaatcccgtgaaggccgacttcaagcaagactgccaaggctacataaggattggccattgggtctacggaacgcaattccaaacgagttcccataccacgtgatgctggcacacgtaccaatggagaacggttgcgacctgcccaagcgatataaacaggtgcttcatatccaggaaccaaacgtttataagagttgacggttgggttggtcaccgctgtaaagttataggcatgcttgatcaagccacccaagaagtgataagctgtttctgacaattgcatgccctttggatcttctggatcaaagaaggcattgttgccatcttggtcaaagagagacatattacagtgcatacctgatccggcaattccaaattttggtttggccataaaggttgcatacaagccgtgtttacgagcgatggtcttcacaacgagtttaaagatttggatcttgtcacaagcgcgaagcacttcgtcgtatttaaagtcgatttcatgttgaccaacggctacttcgtggtgactagcttctacttcaaagcccatcttggtcaagacattgacgatttcacgacgagtgttatctgcaaggtctgttggagccaagtcaaaatagccacctttgtcgtttacttcaagagttgggtctccattttcgtccaacttgaagaggaagaattctggttctggaccaaggttaaaggatttgaatccaagtttttccatatgacgaagagcacgtttcaagttgccacgtggatctcctgcaaatggttccccttctgtcgtatagacatcacagatcaagccagctacgctaccattttcatctccccaagggaagactgtccatgtatccaaatctgggtaaagatacatatctgactcgttgatacggacaaatccttcgatagaagaaccatcaaacatggctttgtttgaaagaaccttgtccagttgctcatcggtagctggaatttcgacgttcttcatggttcccaaaatatcagagaacatcaagcgaataaaagtaacatttttttcttttacttcacggcgaatatctgcagcagtaattgacatttttgtctccttaaaatagattacaagcttatgaaatgatcaacgaaattgaccatatggcgatggggaagatgtgaagcgactttgctgaagaatgtcacgatgaagagccttacggatctcttcttgactgacaaccttggtttgctcttgctctttttccgcatatttcttcttaatatctgcaatattgaagccatctgagatataatctttgatctcaagtaagcggtccatatcgtccaacgaatacatgcggcgattgccttctgtccgatcaggagaaatcaatccctgatcttcataataacgaatctggcgagctgtcaagtcggtcagcttcataacactgccaatcggaaagactgccagtgagcgtcgtaattccttttccttcataccattcctctttctattctattatatcgaaaaaaaaatctatgtcaagattaaatgttatataatcttacataggttttttgtgtttcttgagaaaatcgcgaatgcgatccacatccgaattgaccaaaatcgcaacgaaaacgccgataaaggtctcaaatattcgggcaaaaacatacaagaaggtttctccgttaggaatcgaaagggtaatgatcagcattgccgaaactcctccgataattcctgctttattattcatagcgacatttgtcataatggttaacatggtcgcaatgggtacaaaaatcagagtcacccaatacgccccatgaaagagcgtttttaaaaggaagaacaatacggcataaaaacctccgatactgttgcccatgacacgcgaagccccgaaatggacactcttatcaaagtcttccctcaaactaaaaacagctgtcaacgtcccgatctgaaggcctcgccagccaaatattccaaaaataagtagtacaataaaaacggcaatccctgttttaaaggttctcatccccaaacggaatttggaccaatcaaatttgtgtcgtttaaagtaatccatggtcacctatctttctatttctattattctaccatattttcagaaaggagagaacagatataaatagaaagaaaaaagagagcgggacagaaatcggtaattcgttagaattcgatttcgtcgtcccacctccgtacagttgagtagggctataaaagctgatgaaatcagcctagtaaagcccacccaaccactgcgtcttgctcgacaatctaaaaataattgagaggctaggacttttgtcccagcctctttcattctatttagattatttgtctgtaagagcagccaatcctggaagttctttaccttcaaggagttccatagaagcaccaccaccagtagagatccatgagaatttgtctgcacgtccaaggttgatcgcagcagctgctgagtcaccaccaccgatgattgatttaacgcctggttgtttcacgatagcatccatcacaccgattgtaccagcttggaagtcagggttttcaaatacacccataggtccgttccatacaactgttttcgcaccagtcaattcttggtcgaatttagcgattgatttaggaccgatatcaagaccaaggaatcctggatctactgcttcaccttcagtgtctttcacttcagtgtagtcagcaaatgcgttcgcttcttttgagtcaactggcaagatcaatttgccgtttgatttttcaagaagagctttcgccacatccaatttgtcttcttctacaagtgagttaccgatttcgataccttgtgctttgtagaatgtgtaagtcatcccaccaccgataaggactttatcagctttttcaagcaagttttcgataacaccgatcttgtcagatactttagatccaccaaggatagctacgaatggacgttctggagcttcaactgcttctttgatgtaagcaatttcgttttcaagaaggaatccagcaacagctttatcaacgtttgcagagataccaacgttagatgcgtgtgcacggtgagcagtaccaaatgcatcgtttacgaagataccatctccaagtgatgcccagtatttaccaagttcaggatcgtttttagattctttcttgccgtcaacatcttcgaaacgagtgttttcaaccaagagaacttgtccatcttcaagagcgttaacagctgcttccaattcagcaccacgtgtaacacctgggataaattgaacttcttgacccaatttagcagccaagtcagcagctacaggagcaagtgatttaccttctttatctgcttcttcttttacacgtccaaggtgagagaagaggattgcacgtccaccttgttcaaggatgtacttgatagttggaagagctgcagtgatacggttatcgttagtgatcacgccatcttttacaggtacgttgaagtcgacacgaacgagaacttttttccctttcaagtcaacgtctttaacagtcaattttgccattagatatgactccttctttttttaatacatgataattatatcacaaaatctgtaaaagaggtagaaaaatccaatgcttttcccctctaattcacaggatccgaacgacacttctagatacaagatcaaacctctctggttttcaccagagaggtttttttgagagtgactttttaaaagaacgaaagaatcctgtaaaaggcttactcttctttcttcttaccagccaagaggaatccgcctaaggctgataggagaacagcttcagctgcaaaggaagcttctaggcttgccgtatttggtaagtgttccgattgactttctttgctggcatcttttgtttcttgctgaactgttggctgtgagttcgctccttggtgggcacttaacaactgatggatctcttgatcaaccatatccttgtgttcttcctcttgatgacccgcttgagtagaagtcgttggggccaactgatccacttgagaagactctgtaggcttcaatggattagctggatccggagtcactggggcagctggttggactggttgatttggttgagctggttgaacaggctgatcaggtttagccggttcctctggttggatcggttgatctggtccttccgtttgtgctggcttatagacaatcgcatagtgagtaaagtgaggagctgtaaagatgactacatctccaactctctcaaaggccaaggattgaggagcttgaccttctgggaagaagagaacttgctccacttctttatccttatccacagggattttcacaagggatggatggtgggtatcgatatcttgaccgcttgcatccacgccttcaatatcaaatacgattccttctcggcccttcagctcttctttttctacctgattggcttcaacttttgcgacttttagtcctttgacaacggttggctctaagttggagaattgaacttcgactccagtcgcagggtctacaaagaccgctggcttatcttctttcaggagcgcaatcaaggtctctagacctgtcttagctgtttcaagcgcttcaggagtgagctctgaagaagctaggagctctttatttttctcaaccagtgcctgcaaagcctctccagaagggtgatttggcttgcttgttaatagagcagtcgcttctgttgtcagagcagagagagcttctttttcttttgttagattggcttgaccatccaaggctttcaagagagcggtcaattggttcaactgctcattgacttgatcttgtgtgctggtatcatgctctttcaagactttttcagaagcagccattccagccagcaaagcttctttgacttcaggagtcgcaaaagtaaagtctactttggcttttgcagcttcagcttcagccaatttttgcttaaggtattcatcgttgagagctggttttggattcacgaggacatcaaagcttgtactagctcctttgtaatggatagtgatggtttgacggccttccttgctcgcatcaaatccagttatttcaacaccttcatcggtcaaggcgtgcgtttcggtcgtttcatcttcaaagacgactgtaaagcgtccgccttctttctccaatgcttctccgacgatatattccacttttggtttgtcggtcaattctagaccagcaactgctttttcacctgcttcctctgcactgaccacaaaaacagtgagagtcttatccaatttctgaccaaggtaagaaacttctaggtgttgttctccaagcttgctactgtcaaatccatgaatctctacacctgagttggtgaggttgaccagttgatctgcttggccatctttataatgaactcggagagtcgcccctttcaaggaaagggcatcgccttcccggtagaccttcttggtcaatccatcttcaaattggagtcccgcaatttctttatcattctttggaacctcgatcgctagaacgttactgatatctttgccaggttcttgcgcacgatagtagagaagagatggggttgattcaaaagccagtggtttaaagatgagatttccagcttgatcggctgtcatggtcgcaattggactggtggcttctttatcggcataaagagtcagtgtggtattggccggaacatctttgaagccgacttggacaaaatgattgcccaagttttgcgctgcagcatgtttcatcgggatgttgaccgtttcagtatccagactttcatacatcttccagttgtaaatccggatggcttgccatggggtgccgttatctgctgtaatgacatggagacgccagtcttgagccttgattggatggtccagtgtaatgtcggacacatgggctttattgccacgaacttccttagcgagcttccactcacccgcttcgtccttgtagtaaaggtcgaagtcacgggtattcatcttgccatcatcgacagattccccaccagcaccggcatggtccatgacccaacgaacaatggtccgaggttgtgtcaagcggatatcgacggttccactcaattgagcagaagaccatttatctgaaagactggtaatggtcccatttaacatgccttcaatgccttcactaccatccgcatctgggaagcttgaaccgatcactttggctccgatgaccacgtttggtgctaaaacttttggtagactggtatctgacacggtcatgccccaatcaaaggccacggttcccgcatctgaacgttggccgttcttcccaactgccacaaccttgagttcctgagtggttcctttggcacttgctgaacggctaacttttggtagatagacggttgtcgcagaagatcctgttaagagacgccagttatcgccatctttttcatagacttcataataatccgcatctgctacccctttaaaattgaggactgcttctgcttcttgcgcattttgtaggcgttttgcccgaacggatacttctgctggagtagctggtttctcttggttcgacgtaatcgacaattggccgagattaaatttgtagtctttgacatccgtatcatggtcaaagaacatcttcacagcataaatggtcttgccagccaaacttcccaaatcaaaggtttgagtagaccaatctgcactcggtgttaattctttccattcgtattcagagtagtcttctttggtggcaacagctacccaggcagctgctccgaccccacctttatgactgacgctcaattttgtcgtttctgtcacaggaatcttggtcgaatagagcatgacattttgactgctattggcttttaaatctccttcaaaagctagagaatttcctccattgtaagcttgatcaaaatcatagcgaccttttaatggtgtactatcttcactatgctctacccaccaacgccatgttggaaggtagccagaaacagaacggtagttccattccccttctttagaaatcttgccatccacaaaccagtgttttccgtgaccagtattgaaggaagtattgaaatcttcactagtgattggggttttgtccacaaccaaattagacattccgtaccaagattggtctgctggttttcctttagtcggatctccttggaaacctgtccagaatagatcttcatgagtatggtaaccttctccagtctttcctagacctgtaatggtatctggcgcataaagaccaagagatagacgcaacttgccatgttcatctaaaatggcattccagtctacattagtcttataagagccacctttttggagctcaagtccagctagaacatcataaggattgcgcttaatccatttggctgtactgatggaataatccacttctgatttgccccagttaaagttagcaaagaaggtatccactgggttttccccattttctggctgcatgaaattgtagttgtattctcccagcgcattctcatggtaacggccatattcataggtcatagcatcataccaagaatacttaatcggatagttcagacttttcgcatattccttggtataaagaagaaaatctctcaattttggacccaatggttctacaagatttccggtcgtttcttggttgataaagtaaccatcaaagccatagtacttggcaagttcgactaatttacgggcgatcgggaaagttttagagccttcactatcttctttcaaggtttctgcaaaacgttcttgatccttgatgctgctagaccagttataaaagattgtcccataaataggaaccccatttcggtgggcagcatcgatcacatctgctgatgggaccagcccttcccaaaagaccatagaatccaaatattgccagtaatcaaaagcataggccttaaactcttccccgccgacagacgcatgatccttggctttggagttcatgtttgacagcgcttggatcttcgcttcagggttggcttgttcattaatttgttttccttggaaacgactcgcaagtggaacgcttgctctgttcatatcgtcatccactcgttttcctggttcccacttcaagagatcgtcccaggtatcgaacttaacttctttgggtcttaattgtttttcttcattggttggtaaatcagccactttctcagcagtagctttcggtttttcagtctctgaaacagctggagtatctgtagttgtcgagctagcttctgtacttgtaggcctagcctctggagtgaccgcttctgcggctggttttgcaggatcagctgtaggaagtgccgcatctgcagtatagacaccagcttctctcactaaatgattgacgtcttcggtcgctactgaagaggtttctaagggttgttcactagtagaaaccgcctcatctgcagagacagcgcctgtccctaaaaatgctaacccaatcaatgtggaacaaactcccacactgaattttcgtatactaaatcgttctttcttttcaaatagatgacctttcatcttgacctccttgtatggtttttttctttttcttgagcgatttccattggctcctttctctacgacctgtaatcgctttcattttcttgtattagaaatctccaatcaagaataggataccctaatctatttagcactgtcaatctattttagcaattcctataatatgatgagaaagccctaaaaaaagtacaaaaaaagaggaggtttccctcctctcatcatacgcatgaattatttagcaatttttgcgaagtattcaagagtacgaacaagttgtgcagtgtaagacatttcgttgtcataccatgaaacaactttaaccaattgtttaccgtcaacgtcaataactttagtttgagttgcgtcaaacaatgatccgtaagacatacctacaacgtctgaagaaacgattggatcttcagtgtaaccgtatgattcgtttgaagctgctttcatagctgcgttcacttcatcaacagtaacgttcttgtcaagaacaactaccaattcagtaactgatccagttggaacaggaacacgttgtgcagctccgtccaatttaccgttcaattcagggataaccaaaccgattgctttagcagcaccagttgagttaggaacgatgttagcagcaccagcgcgtgcacgacgaaggtcacctttacggtgtggaccatcaaggatcatttggtcaccagtgtaagcgtggatagtagtcatcaatccttcaacaacaccgaagttatcttgaagagctttagccattggagccaagcagtttgtagtacatgaagcacctgagataactgtttcagtaccatcaagaatatcgtggttagtgttaaatacgactgttttaacatctgatccaccaggagcagtgataacaactttcttagcaccaccagcatgcaagtgtttttcagcagctgctttagtagcaaagaaaccagttgcttcaagaacgatttctacaccgtcgttagcccagtcgatttgttctggatcgcgttcagcagaaactttaacgaatttaccgttaacttcgaatccaccttctttaacttccacagtaccgtcgaaacgaccttgagttgtatcgtatttcaacaagtgtgcaagcataactggatctgtaaggtcgttgatgcgtgtaacttcaacaccttctacgttttggatacgacggaaagcaagacgtccgatacgaccgaaaccgttaataccaactttaactaccattcgtgatttcctccttatgaaaatcaaaaaaattttttgtgaaaagagtaacttgacacagcgccaaacatcttttaacagtctctattatatactttattgcattaaaaagcaactatttcccaacgaaaagcaagatttatcatagatcaccacctcttttattaaagtttttcacaaagtcttgatcgataggaaaagcgctattttacttgtactcacttttggaacaaagaaaaactcttcccaaagtgggaagagtttttaagcattggtaaattaagcttcacctttagcttttttaatgatttcttcttgtactgattttggtacatcttcgtagtggtcaaataccatcatgaaggtaccacgtccttgagttgcagaacgaaggacagtagcgtaaccgaacatttcagcaagtggcacataagcacgaacgatttggcttgcaccgtgtgcttccataccatctacacgtccacgacgagcagttacgtgacccataacatccccaaggttttcttcaggaactgtgatggttacaagcatcattggttcaaggatagctggttgtgcagtcttagcagcttctttaagcgcaagagatgcagcgatcttgaaggcagtttcagatgagtcgacatcgtggtatgaaccatcgtaaagcttagctttcacgtcaaccattgggtaaccagcaaggacaccgttcgccatagattcttgaagtcctttttctactgcagggatgaattcacgtggaaccacaccaccgacgatcgcattttcgaactcgaatcctttaccttcttcgtttggagtaaattcgatccaaacatcaccaaactgacctttaccaccagattgacgtttgaagaatccacgtgcttgtgtagaagcgcggaatgtttcacggtaagatacttgaggagcaccaacgttagcttcaaccttgaattcacgtttcatacggtcaacaaggacatccaagtgcaactcacccataccagagataactgtttcaccagtttcagggtttgtttcaacgcggaatgttggatcttcttcagccaatttttgaagggcgatacccatcttgtcttggtctgctttagatttaggctcaaccatcaattggataactggttctggaacttcgattgattcaaggatgatttttgctttttcatctgtcaatgagtcaccagttgtagtatctttcaaaccaacggcagcagcgatatctccagagtaaactgtttcgatttctttacgagtgttggcgtgcatttgaaggatacgtccgatacgttcacgtttacctttagaagtgttcaagacgtatgaacctgagttcaagacacctgagtaaacacggaagaatgtcaaacgacctacgaatgggtcagtcatgatcttgaaggcaagagctgcaaatggctcttcatcagatgctggacgttcttctacttcgtctgtatctgggtttacacccttgattgcagggatatcaagtgggcttggaaggtagtcaaggactgcatccaacatcaattgaacccctttgttcttgaaggcagaaccacaaagtactgggtagaactcaacgttgattgtagctttacggataccagctttcaattcttcattagtgatttcttccccttcaaggtatttcatcatcaagtcttcatcagtttcagcaactgcttcaaccaatttttcacggtattcttgagcttgttcaaggtattcagctggaatatcttcttcaaggatatctgtaccaaggtcgttagtatagatttcagctttcatcttgatcaagtcaatgattccgcggaagtcatcttcagaaccgattggcaattgaattgggtgagcgtttgcttgaagacggtcatgaagtgtgcttactgagtaaaggaagtcagcaccgattttatccatcttgttagcgaatacgatacgtggaactccgtattcagttgcttgacgccaaactgtttcagtttgaggctcaacacctgattgtgagtcaagaacggttacagcaccgtccaaaacgcggagtgaacgttgaacttcgatagtgaagtccacgtgtcctggtgtgtcgatgatgtttacacgagtgtctttccattgagctgttgtagcggcagatgtgatagtgataccacgttcttgctcttgctccatccagtccatttgtgacgcaccttcgtgagtttcaccaattttgtgaatcttaccagtgtagtaaaggatacgctcagttgtagttgttttaccagcatcgacgtgagccatgataccgatattacgagttttttcaagtgaaaattcgcgtgccatgaggtttgtttctcctatattttttatttctatattctattataacatgatttaataaaaacggataggcaggacctacccgttctcagtgttttcatgctaagttttggttccaacttgtaagaaaagttgtattgaacttgggctaaagttagttagccgatttgagctcaattgaactcgggctaaaagctcaagttaactgatttgaacccgagcgaggcccggtgcaaaaaagataaactgctttgtgttcacggaacactgcatcagtttcctatttttgccttgggcctttgccgctcttagtatcattttattaccagcggaagtgtgcgaatgcacggttagcttcagccatacggtgagtatcttcacgtttcttaactgctgcaccagtgttgttcgctgcatccaagatttcttttgcaagacgatcaaccattgtgtgttcaccacgttgacgagcgattgttaccaaccaacgaagtccaagtgttgtacgacgttctggacgaacttcaactgggacttggtagttagaaccaccgacacggcgagcacgtacttcaagtacaggcatgatgttttccatagctgtttcgaatacttcaagagcgtcgtttccagtagcttctttaatttgttcgaaagctccgtaaacgattgaagcagctgtaccacgttttccatcaagcataacgcggttgataagacgagtaactaattgtgaattgtaaagcggatctggcaatacatcgcgtttaggcgcacggtttttacgactcatttttctttatcccctttccttatgcttttggttttttagtaccgtatttagaacggccttgtttacgatcgtttacacctgcagtatcaagtgctccacggacgatatggtaacgtacccctggaaggtcttttacacgtccaccacgaagaagaaccacgctgtgttcttgcaagttgtgtccgatacctgggatataagcagtcacttcgatcaagttgctcaaacgtacacgggcaaatttacgaagggcagagttaggttttttaggtgtcattgttccaacacgagttgcaacaccacgtttttgtggtgaagaaacgtttgtttgaacttttttatgactgttgtaaccaacgttcaaagctggtgatttagatttttctacttttgatttacgcggtttgcgaaccaattggttaattgtaggcatctacattctcctgtgaaattttttatttttggtgatggtacacttggtgacagctaccatctgtgtgtacttttgcaacatttgtcagcacgtccctgtacactcttgagagaccaaaagtaaaaagtaccgtctattattataacatgacggcactttgattgcaagatgtttttttattttttaaagaagtcgaaaaagttcattattgaccagcttcagcaggttctcctgcccctgcatctgcagccggagcatactgttgttgctgttgtggttgaactgtcgcattggcattagcgtttgtgttcgtgttggcattagcgtctgtttgtgtctgctgtgttgccgctgtgtcgctctcataggtcagtccataatagttagcgatgtattggatacgggcctcaagcgattgcttttgagtcgcatctttgactttcttcacagcagcctgggcagcgttcacagaatcttgactaggagttgtttccatttgaacgactgctttttcagcagcttctgtatttttcttttcttccttcttttctttttcttcctttgtttcctttttcactggaagggaacctgtttttttagcaggttgaatttctgtcgttacctgagcagctgtattctttttaacggtatacaaaccagctaccaaaataaaggatagagacagaactgtcaccaagcgaatccacaaaggactattatcaaatcgatctaaaattcttttcactttttgatcctcctttgttgctcttaatcaaagatattcccaacttcgacactcaatttattttcttttacatcgatgttggtcacgcgcaataaggatttgtgttcaaagaattcacggtcggttgcagcattatccgcaaaaacagctacccctgctaattcagaatcgaattcagccaagagactgaccatcccgttaatcgttccgccacctttaaggaagtcatcgacaatcaagaccctgcttcctgcttttaggctccgttttgaaaggaacattttctcaatgcgatccccacttgagcctgaaacatagttgacactaacggttgacccttctgtgattttcaaatcacgacggacaatgacaaatggaacattcaagacattggccactgcattcgctaaaggaactcccttggtcgctacggtcatgacagcatcaatcttcttatcccggaaggctttggcaatgatacggccgatccgattcaaaatcttcggattgctcaaaagatcagacaggtaaatgtagccaccaggaaggatacggtcactttcagacagttgcttgcaaagatcttcgacgatttctttggattcttgatctgaaatagacggtgtaaagatcacgcctccaccagctcctgtaatggtctcaatatttccgatttccatctcttcaaacgcacgcttaatgatcacgatatcttctgagatggaagacttggcagactcatacttttccgcaaacgtattgaggctagtcaattcatagggatggttgatcaagtaattagaaattacgaccatccgttcacttcttcttaatttcattttctcaccatgtagttttttctatcattataccataagaagcgaaaaaaacgaacattctgatttacagaaggccgttttttcctgattattttatttttggcagaatcattcccgtatttctcgccgtttttactagtcgagattcggtttatagaaggaacgattttccatagcgaagattttattggtcatctcgccaggaccaattaagccaagtgctgttgtcatcatcatcatttccgcatccaaattatcgatcatatgaataatctctgcttccatgatttttggacgaacagggctaccgtattcgagcaagccatggtgactcaagatcacatggcgaaggacaatgacttcttctttttggtcatcaatcttcaagtcttgcaagaccttggtgatttcttcatcgatgagtgcaatgtggccgatgaggttgccccgaacagtgtattctgtattttcagggcctgtcaactcgatcactttggccaaatcgtgtaacataatccctgcaaagagcaagctcttattcaactgaggatagatatcgccgatactatctgccaagcggaccatggttgccgtatgataagcaaggcctgcttcaaaggcatggtggttggtcttagcagctggataactataaaactctttctcatatttcccatagagggcccggacaatccgttgccagactggattttcaattttgaaaatcatgtttgacaggtattcatgcaattccttgggatctactggtggtttttccttaaagtctgctggattgttgggctctcctgcttggggcaagcgcatgtttaattggttgacttgcggagtattattgtaaacttctcgacgtccagacatatggaccacgcgcccagccataaaactctctacattgtgaggttgggcatcccatagtttaccttcgattgtaccggtctcatcctggaagacaaaggcgaggtagtttttcccggcccgcgtttgacgcacttctgctgacttgatcaaatagaatccttcgaacaattcatcttttttcatttggttaattttgaccatcatcttctccatcttctatatatacatctagtcccagcaggtcctcatcgctttcgatttggcggagtgtccgctcgatggcactggtccgtctggttagcaaatcatcaatattattggaagcattctttaaatggcgctgagtcttggccagaatccctccaaacttatggaattctgatttgaccgatcccaacaccttgctaatgtcatctgcactcttttggatgttgagcgttttaaagccaacagacaaggagttcaagagggctgataaggtacttggcccagccactaaaatttgttcgtcccgacgcaagcgatcgaagaattctggattgcgaaccacttcggaatagaggccttcggttggcaaaaagagaattccgaaattcgttgtcgctggtggaaagaggtatttttgttggatatccttagcaaaacgcttgatactagcaagaagggccttgcggtaacgctcgatctcctctttctctcctgattcataagcttcttccagacgatagtagtcttccagtgggaatttagagtcaattggcagatagactggctcctctccttgtcctggaagcttaatagcatactccacgcgctcactggattggggaacggtgacaaactcccgctcatactgggctggggtcaagatatcttcaataatttggcccagctgtaattcgcccataatcccacgcgtcttagtattggagagaactttattaagagttccgacatcccgcgccaccgtctgcatttctcccagccctttgttgaccgactccaattgttttgaaaccgtctcaaaggaggtctgcaagcggtgctgcaaggttttctccaatttttcttctaccgtttggcgcatctgttctagccgcacttcattggactcttggatctggcgcatgcgctcatctgttttgtcccgatttttagtaaagtgctcattcatctcagcgcgcagagccgtcgtctgctggtggatctccactcgcatctcggtcaagcgatctgtcagagcgatctctaactgctgattggcaatctggcttgcttgtctttctttttcaaaacgatagtccaactggtctgtcaaatgatcctcatggtcttccagcatctctcgtaaagccggtcttgtgtcgtctgaccgttgcaagaaatagatgaggaggcccagattgagtaggccaatcagaagcagaatgatattcatattaacctctgtctttactataaacaatgacaagatagccacgatcaagactcacttgaattggttgatccaaaaattcattggagccatacatggccttcaaaaaataattctcctgatggagcggatacttggcccctgtgatctctaagtggccttgtccgacaggcataaaaccaacataggacatggcaggatctggctgaatctcatggcaaccggctgatctgtagatcaagcgattttgaccgtcgactaattggatttgctccatgtagggagctaggtctggatcggtcggcaaaaagatattggacaagaagtgatccaaacgaccgccaaaggcaccataaacggtgacaccagcctctggataggcctcaaaggccgcttttaaggccaattccaaatccgtatcgttcttttcagggatggattgaataacctgcttggcttgggtttggatctggcgcaaatcggtctcagagacggaatcgaaatcccccacagctatatctaaaggcagaccttgttccagtaacttcaaacagccaccatcaacgcctacataaacgtcatgatttcttggcaagagcgtgctgtcacctcctgccagtattgcgatgttacccatttacagcatctcggagcgtttgaacacgctcattgacatctccattaaagacataagagcctgccacaaagacattggccccagcttcttttgcttgggaaatactttgagcatcaattccaccatcgacttcgatatcaaagtctaaacctttttcttcacgaagagtggctaattcgcgcaccttgtccatggtttcaggcaagaaggcttgaccaccgaatcctggattaacagtcatgaccaagacttggtccaccaagttcaagacatgtttgatactgtctacaggagtccctgggttgatcacgacactcgccttcacacccgcttgacgaattttttgaagagctccgtggatatgaggagttgcttctacgtggatgctgatgatatcagcacctgcacgggcaaattcttcgatatggtgttcgggattggtgaccatcaagtggcaatcaaagaccaacttgctatgtggtcgcatgctctctacgacaccagctccaaagctgatattaggcacaaaatggccatccatgacatcgatatgggcatagtcagctcctgctgcttctaagcgtttcaattcactttcaaaattggcataatcggcactcaaaattgagggggctaatttcattgttttcatcgttgtagtgtctcctattttggcatttttttcgaaacttttttataggtttcgcgacggttttcaatctcacttagaaattgcaagtaatcctcataacggaaagatgcaatttcctctctttcaacggctggtttcaccgcacaagctggctcatgcgtgtgggtacaggtacgaaatttacaagagtggctcacattggcgatctccggaaaagcttgatttaagtcttcactggtcgtcacttcataatcaagggaggagaagccaggcgtatctgcgatctttcctccatttaaatggtaaaagctgacagctcgggtcgtgtgtcgaccgcgccccagactatctgaaatctcacccgtttcaagctccagatccggagcgattttattgagcaaggtcgattttcctacaccggtctgtcccataaagaccgtggtttgattggtcaaaaggagcaagagttcctcaattgacaagacaaagtcatagccaatagcctggtagattccttggtagtagtggatgtcttccatatcttctaataagtccagttttgaaatatagacaatgggatgaatccccttatgctccaaaagaaccagaaaacggtctaaaagattggcattgaaatccggttccttagctgacatgatcactaccgcctgatcaatattgacaataggagggcgcacgaggctattttttcgaggcgcaatgctcaaaatgtagccttctgaattctcttcagcagagaactccacctgatcccccacataaggagtctgtcctttttttctaaaatttccacgagcccgtgtctggtaaatgtgaccgtctgactccacgtagtagaagccagccaaggccttgacgattgttcctagcaaatcgcactcctttgagattaatactatctattataccaaaaaatgagaaataaggctggattgcttgataataaaaaacgaaaagtgaacctctccgaacgcttttagaaacgaataggttcgttttttaaacggatagaaacagaagacggagtatccgttatgacttgtcttttagcagaattcgggaaagggcaccttcctttttttccttggcatttttcctaaaaagtgtataatagaactatgcggaggtggtggaacggcagacacgcatgcttcaggcgcatgtgccccttcgggcgtgagggttcaaatccctttctccgcatcttggaaaggtggcccagctcggtacggcaccggactcgaaatccggcaagtggattttattcacgcgcgggttcaaatcccgtcctttccttacgatacaaataagccataggttataacctatggcttattacttataaaatttctttgagactttcctttggtgagtacggacgttagcgaacttctccgaagttccataactaatttttgagccttaagtctcaaaaattccgagagcctaaactaccttttatttaggctcttttctcacagcggaaagtctcgatttgtaaccaatatcattcgaaaacacataaaaaacatagtgcttcatagtgtatttagaattaagaaagaagattacgaacctatgattttctgttattttattcctgcttctagaaggccgtctgctaggcgagcgaagtcttctaagctaagagcttctcctcgtacagaaggttgcaggcctgcagcttggattcctgcttccagcttggctttgatttcttcggtcttgccaaagcgactggtcaagttgttccaaagcgttttgcgtcggtggacaaagctagccttgctgacagagaagaagaaatcttcatccttgacggctactgctggttcttcgcgacggaccatcttcaaaatggcagagtcgacgtttggtgctggcacaaagacggtgcgaggtacaataaaggctaccttggcagtcatatagtattggacagcaatggataacgaaccataagctttggtgttgggctcagctgagatgcggtctgccacctctttttgcatcatgaccacaaattcttggaaaggaatcttggattcgatcaagtgcatgaggatgggagtcgtaatgtagtaaggaaggttagccaccaccttgatcggaaggtctggatttttaaactctgcgatgtactggttgagatctaccttgaggatgtcttggttaacaaccgtgacattgtcaaactcccgcaaggtatccgctaagatgggaaccaaacggtcgtcaatttcaaaggccatcacttctgccgcattttccgccaagaactcagtcaaagctccaattccaggaccgatttcgatgacattgacctgcttattgatctctgccgtatccacaattttttgaaggatgttggtatcggtcaaaaagttttgaccgaaggattttttaaaggtaaatccgtgacgctccagcactgccttggtcacgctataatctgcaattctcatgtattctcttttctatttattagctaaaaacaatatataaaacccacataattcctagtgccaacaaaatccaaaacactaaaagaacacgagacttgttcccttgtgaatcggctccagtcatatcgatcgctttcttatcttcttgggggttcattttcttcagttcatcctgataggcaaccgaatctagaatattgtcttctggcaataattctgaagcataataatcaggaaagcccatagcaagaccaattaagttcttttctgtcaaagaaaaatctaaatctttgggttgattttcccgaatagctcgtatattttttaacagtttatcagaaacaacagacacttggtccataaaaacaacatctaagacatcaaatccgagcacatcaccatcttttacgtttgcaagaatataacgaacaaaggcatcatataattgtaaggtctgagaagcattttcttctaaaaaagaccgattttggagggcgttttgctggaatttttcaataggaagcaagatatctacattctgctcttggtaaaatctttctgcttgttcttcatcttcttcaagttcttctgctgtttcccagagagcaataggagcttttaaatcttcttcatcccaaaacaattgccaaaaataaggtatcgtgtaaattccctctgttaagatacgagcttcatctccgttttttaagtaaatataacttctattcgccattccatttcctttcaaaatctttgaaaaagggtagtggttcaggtaagatgtagataaaactatatagtttcccaatgaaagaaactctctaatctttatctctgccttctagttcctcactaaacttttgcatttccttaaaagctgttaggctaacataggcacccgcttcataatactccgttggatttatggcatagtcaaagccttcaatcatgccaccagcttcttcaatcatgccattccacttttcatcaaagaccattcgcagacgtttccaatcagtaaatactggcacagaattgcgcccatcttttccttctctgactgggatgctgaacttagcgtcttctttcaatacaaaggagttggctccctgactcttatcggggaatcccgaagtagcatttaaaggaatgaggagtttggcttttggcatggctgctgagaagaatttataatagagcttatatattacttcttcgtcatctgttgtaggcttatccatctgccccatcaacagcatccatcttacaatatcaggattcataacaggaacttgtatctctggtaggttcgaaaaatctggtttctgaaccaaaacagaagcactaatgctgacttccttggtattaaaggctgctcccaaagctccatttaagtaaaaggctgtcccaagaaaattctcaattccttttttatctgctgtattttcaatcagtttcacaactgaatttggtcgacgatcaatggtttccttaaattggtgataccaacgcggcgtatatagcatgatcatcgggtctgaacagagatagccctcttcacctttatcataggtcgttgagaaaagatacgcttcccctgttttttctgaaaagaccgcgtaaatcgaatctgctgctaacaacttgtccttgacgatttctgctaggcgttctagctttcgagtgttagcttgatagctttcttcactttcagttttctgattttgacggcactcccataaaaagaggcgcaatatttctatgctatcatcaagactagcggcttgatagtcttcattggacatttgacctttttggacaattacaaacgcgttataaagagcatctgtatagcttgatagccgttgttcctcatcgacaccataactatagagaacacttccctttttaagattaaccaaggaagtttccatatcgatgaccaaatgagctagagattcatccgtgagaacatctacatccttattttgattaatgagttttttcacgactacagaaccaagagcgtccataccttgatcgggattgcaaaattgcagacaatccccaaccttgagtccgccctctaagctcccaataatcaataactcattcgtctcctttatcggaaatagttctagaactcccaagcatgttttgtcaattgactctactgttttgtttgttgcttcagttgtttctgtcttttttaaaaaatcgaagattcccataaattatcctcattatctacactcataacaaatcctatggagtcacttttctaatgcttgcaaccaagcctgattaaaccgtatatacttacttctattgcgtcatcttccccttgcttttgggggagtttctcaattctcataacttttcatggtagcttcaacctcagccaaactaattccaaacaactccaagcgtttgagtaattgcttgccattgcagtagccgatgcgcaaggcttctcctagatattcccgccgtttgcgactatcgcttcccatcaacagtccaagccgcatcaagtcggtctttgtgatatcaaagaaattttcatcttcgtaagacccgaccagtccagctagggctttttctaaatcttcaaagttcgcatgctccactccaagagaacgccccttggtcttggatttggggactgcttcaccacgatttaaaaaggcatgtttggcttggggcacctcttgcataatgatcttgcgaatgcgctcgccattatagtctggatcggtaaagacaatgaccccacgcaactcttgcaaggtagcaattcgttccaagtcatcttgatcgatcgcagagcctcgcgtttcataggtatccacctcataaaaacgacggagattggctgtgtcatccttgccctccacgataatcacttccggtatttttcttttctcagtcaaggccaaatacctttcttgcattgtcataggttgcctgagccacttcttctgttgttaagccacgtagttctgcaataaaatctaccacataacgagtgtaggctgttttattttcccgaccacgtttgggaactggtgccaggtaaggagcatctgtttcaaccaagatcttgtctaacggaaggccagctgccgcttcttggacatctgtggctttcttaaaagtgaccactccagaaaaggaaatcatcatccccagatccatgaagcgtttggcttcttctagacttcctgagaaagaatgcatgatcccaccgcgaggcccgactccttcactcttgatgatggtataagtatcttctaaagcatcacgtgtatgcaccacaaaggggaggtccaagtctttagacaattgaatctgacgacgaaaaaccttttcttggacatcttttggtgccgtcatccagtggtaatccagaccgatttctccgagtgcgacgactttgggatgttttagctgttcaagtaaataggcctccacttcaggactataatctcctgcctcagtggggtgccagccaagcgtgagatagagttctggatattgatctgccaactccatggcacgctcaatcgtcggtttgtcaaaaccaacgatattgtgggctacaacacccatttccttggccaagtccagctcttcttgttcttttcctgcgaattcttccacattgagatgggtgtgggtatcaaaaatctgcatgatcttccttttcttccgagtttttcttctttctattatagcagaaagcgcctctaaattcactttcggacaaaacaaaaaccagtagtctcgagtttctactggtttttaggtttttatctgaattaggcagccaaaactttgcgtcctttacgacgacgagctgccaatacgcgacgaccatttttagttgccatacggtgacggaaaccatgtttgcgcgcacgacgaagtttacttggttgataagtacgtttcacgatgaatacctcctcatagattttgtattcgtttagccggctagttgtgatcagttactaaacatactttactattctatcggattcgactctatttgtcaatagctatggcaaaattgttgcaaatacaggttggagaaaacctttctacacctgacgggttgccaagtaatagggttccagagccaccagcgcctcttgcaactgatccaagatatcctcaagagaaccttcctcgactagagaaacatcgtatttgacgaggaccttacgaaccgctccgtctgctactgcttgtaacaaatcatggcgattcttttctgttccctctaccctttgactctctccatttttctgggcgaaataataaactggctgagagattggaagggtgagaaccttgtgttgcttttgaagactctcctcatctttttttcgctcgataaagctcacctctaaggaaactccaaaatcagctgcatctccataaagcctcaaggcaaacatgggttctgccatcgtcccttctccttttagataggcccaaaaatgaggccgcaagatctgggcctggttcatccattgactggtccgatcttgctccaagtaggggtgacgcttctgaaaggctgagactaaatcggtgaattccttacgagccgcttgagctagggcacgatactgctccatctctaaggctagcactccagcctttgctggggcctggtagtgaattccttgaagctttaaaaactctcgaatcgctgcaaatgccatttgcttcctttctaaacctaaaaaaggagagatcggctcaatcccgtctctcccttatgggaaataatagctagattatccttcgatgtctaccaccacgtaacggtttggttcttccccttcagagtagctagtgactccttccatcttagagacgatacggtgaatgattttgcgttcactgtttgacatcggatctgtctgttgggcttgcccatcttcgagggcacgtgttgccaacttctgagcatagctttgaagaacttctgcccggtgttctacatagtcattaacattaatggtaatgtaaaaattctttgagtagcggttatagaggtaattttgtgccaaaagttgaagagccttcaagacttttccgtggtaaccaatgacacgtcctggttcattggtatcaatttgcatattgactgtacggcggttgtgactgcttgagatggttgcatccacatccatttcatcgaccactgtttgaacataggctgtcacatcagctacgacttcttcgatgttgtagttttcctctacctcgataccaaggtttgagaaatcagattcgcttgattcttttgtcgctggttctttaactttttcaaggatatgttcatgccctttttcttcaagaacggtatctgcttctttgtcatgtttcaggatttctgtcttgatttcttcagagacaacttctccttcttcttcgacctttttgatcgctgcaacgacgcgtccgagatcgaccgttgcttcgctcaccgtcttcaccggttcgttttgtgcattgatctcatctgggacacctttgacagctttttgattggcttttacaacagttgtttctgcaatgggctcaatctctacttgggctggttttttcccaaacaagccaagaaaacctttcttttcacgcgctacaaccgtaatatgtgccttcatacgaggaatatctaaatcgttcagacctttttgaatcgcttcttcaacagttgctccagtatataggaccatatgtccacctctttcttattttttctttttctgtgctttgtttagggcacggcgtttttgtttttccatgtcgcgcgaagcttgctcttttgcttcacgctctgcaataatcttgaaggggttgttcaagagataggtttgcccgacttggtaagcattggaagtcacccagtatagtgcgaccccgctggctgagaacaaggcaaagaagaagatcatcacaggcatcacatacatcatggttgtcgcactaccattgcgctctggcatggctttattggtcaaccaactgctgaaaaatgtgaagagtgctgcaagaaccggcaagatataagtcgggtcgatcgcgccaaggtccaaccagaggaagtgaccgactttaaggaattcgacacggctcagcgcttggaacaaggccatcaagaccggcatctgaattaagagaggaaggaaggctgaagacgttttgacacctttttccttgtaaagggcccgcatctcttcagaaagcttagtccggctatcgagatccttcccaggatacttagcttgcaattccttgaggaggggttgaatttcctgcattttgcgggttgaattcatttgatattggaagaggggcaagaggaccgtccgtatgacaatggtaaagacgataatccctacaccgatacttccgccaaaggacaagaagcggatagcttctgcaaagaagtagacaaagcgttcccaaccacctgtcgactgagctgtcacttgagaggttccacaagctgtcaagaccaataaggccgctcctaataatccagttaacttcagtttctttttcacattattccctttcttggtagacatgcgctaattttaaaacatgtacaagatttttctctacttgatgaaagtcgagctcctccactcctttacgagcaatgacaacaaaatcatcggtcgtaaggaaggcttggtgtttgatcaaaacatggcgaatcaaacgtttgatgcgatttctggtcacagcatttcccagtttcttactaacagacaggccgactcgaaaatgcggttggtctttgcgcaagcggtaaacaacgaatttccgattggcaacattttgaccacttttaaaaatagcattaaaatctttgtcacgtttgacgcggtagctttttttcaaacctcaactccctctattaaatttattctattataccatattttcaaaaaaaaccaatctcactcaggaaatcggttgctacttgaatacagataaaagcaaaggcaaggtgtagtagagattgagcaagatatgagccaaaataggagcaaggagcgtcttgctccgataatacaggatcccaaaaatcatactcggcaggagatagatgatagaagctcctagcgaaaagggattgtggagaaaatgtaggccactgtagatgagggctggaagccaaatctcagcatagagtttccagcctttgaagtaggcatttaccaaggctccacgaaagatcagctcctctgtcaccggccggatgataaccattgcaatcactaggataagcacacctgttgggctaatttcccgtggaaagagactcaaaacggctgctcgtccttgaacaaaaccactgatgaagtagtccaaccagtaaaccaaacaggccgcaaaaacggcttctatcagagcttgaagagggttcttccccagcttaaactgcgcttttttagaaaaacgatagaccaaaaatcctgtaaagactgcatagaggccttctaggccaaataaggtccaataatagctatttgcgcttgctacactattggagacatactgggctaaggggcgaaattgaggccgaacataaaaataaaacaagagcagaaagaggggatacagcagcgagagctttcctttgatgaatttcatagatacctttcctataaagtatgacaaatcgtatagtgcatcttaccataatcgtgacaaggtttcaatgaaaaaggatgccttcctactctctgagataggctacataaccacctaggatagcgactaaaatcaagagacaaagaagagtttccagccatacgagagctgtcaagaaaggcagttgcaacaagccttgggccattttcaaagaggtcgctgtgatgactgttggaaaggtcagggctgaaaaagcaggttgaaaaccttctttgatcattttcggtaggcgcgtcaaaacaaagaaataaaaaccttgcgaggccaccaccatgattagtaagagccaggtaggcaggcttgctccacccacacgaaccagggctgctaaaagaagggaaaagggagcacaatagatgccttcttggcccaatagatgactgggtaaaggggactgcttcaaatcatggtagataaggggataaagaagaaaggtcaaaccaaaaccaatcactaaagcgagataagcaatctccctgattcctacaacagggtaggtcaaggctgctactgcaatgcccacatagagaacggtccaactgggagtggcattggctcttggtcgcgctaggacatgggtcttggtaaaatagagaattaaacccagatccaagagaaaggcagaccaccagaccaactgtgatagacctccaaaggcgggaaagaggcgcaaaagataggtggatagaatcatccctgccatgggaaaagtcgccatcccagataaaagggctggttgttggaattctatcttggtttcttgccagcgaatcgcatgataaacgacaaagaaaaaccagaagaacaaacctgtcagactaaaggcgtgagcaaggaagggtagcgagtctgcaagaaggtttccagcgccaaccagtcctaacagacagcctgaaaatactaaggggatctttttcatcggaagctccaatcattttatcgctttcagtataccataaaagagaaggaagcaggataaaaaagagagtgggacagaaatcggtaattcgttagaattcgatttcgtcgtcccacctccgcacagttgagtagggctgtaaaagctgatgaaatcagcgtagtagagcccactcaaccactgcgtcttgctcgacaatccaaaaataattgagaggctaggacttttgtcccagcctcttcaaattgtagatatttctttaattttttaagtatcatttaggttgcattatgtaagaaacagatggattacattctaaaagaagttggagaataccaacttctttttatccattctattagaaactaggcctgtacgaccatcatataaagaaataaggatacgagaaagacgatactaacaacgagggtcgctagcttgagtccacggtgggagcgccagtaacttggctttcctaggttactggtcgcatctgttgaaagcgattgttgttggcgaggctgcaaggtgatcagaaccacaagagcgagggataagatcgagatcccgattgcaaataccatttccatcttaggatcctcctaacactctgaagagggtaaaaataactcccagcagaatcaccaaaccaatgatcacattaaaagtaacattgatcttttcagaacgtgtcgtcttttctttttcggcaggacggcgtttgagagactccatccgtccttctacttctttgtaaaataaatctttcttacgatcactcactgtgtccacctatcccttcttgcaagcgagctttgaaaacagctggctcaacgctacttgattgggcaatttgttgtgcgacggcttctctgtagttatccacagattggtagatttcctggatacgggccaccatatctgcttcttttccttgatcaaagatattggcttgtgcgaggaagtggcggtcatgcagggtatggctaaaggcaaggatgacttgctggtgttcgaaggccttgcgaacaataccttgcacctctgcatagtggttgatatccagataaatactagagaccttaagcaactctttgatccgctcttgactgatattttggtacaagactacatttggatagcgaaccatagatagaagactagcagacatctccgtcaaagctgctacacggaaggtcacattcggcaagttctctactaggtaggtcaaggcttcgatctgatccgaattagtcaagacaaaggcgtctttacggatatcgtctttcaccttgaaatcatacagatatccaaggggaccgaagtagctatgctgatcttgcgaggtcaactgcaaagcgcgatgataggtcgcgttttgcggaatcaagatcttcttggtccggatttctgggctctttagaatcaactgcatgttgcccggaaggctgtcgtgaagaggctcctgccacaccaagacgtcgcgtcctttgatgcctttattgcccagctggagactaatgctaaaggaggtagccagcgtattgtagaccaaaccatctagatcaaaaccacgatactctagataaaagacaaagtaatctaagcgattcttgaaaatccgcatcggttgatggtccaaggtcaagatcaaatcccctgtttggtgattctctgtcaagcgctcggtatccccttcaaaataagtagtcaccaaatgctgaccttgatcaccacaagtcgttacagcaatcttacgaccgtattggtcatagtgctcaatcatgaccacttgccccttatcatctaaccactctaagcgctcgacgatgcgtttataggaagcagcatggtacacaatccgagccttttcttgaccatagtaggtcactttccccgaactgttatccccagaaacttcccagaaatcaggcactggaacttcattaaagtagcgtccccgcttctccccttttgcttgtcctaagaaatagataaagggagactcgacaccgtctggtaagaaaccatttggctccaaaataacggtcggatggtcaaaaccagactctttcatggagtggagcaggtcttggctttcacgagaataactatcaaatacgttcagcatgtgtcacctcttctatcaattgtgcccaagcttcttctactcggctggtcaaaaagtcttctgcacgcgcataagatgcttgacgcatgctggatagatcatcttttttgtatagctggatcattttttccgcaaaggcagaagcaatctggtcgaccacttgatctgctgaaggcggaatgagatagccatttttaccttctgtgacaaaggtctgattgccataaggaacatcaaaaccgataatcggaagtccagaaccaatcgcctccatcaaggtcaacccaaagccttcactggtcgacgcggacaggtaaacctcataattcttataaatttcctctagattggcatgccctttgagatggatatagtctgccgcccccaattcatcaattagagaacgcaacttgccttcttctccaccttttccatagatgtcaaaagacagttctggcaattcttttttggcgcgaaccactgctcgcactaaccagtcaatatgcttttctgtcgccaaacgagaggcagtaatcatagaaaatggggtgcgattttcgttttgtggcaagcttgcaagactcccaactggaatggtatagatggctggctgatggttggtgtatttggcaaactgctcggctaagatttctttttgacggtcggtcgcaacaataaagaagtccaccttgtcagcattggtaaattggtactcgtagtagttgttccacaggatatactgatcgtcaacattattggcactgaagtgctctgcatggacgaccacacccaggcgggctttttgcgcttcttcaaagataggctgaccgatattggtttcccgatccaaaatcaccagatcttgtttggtcaattgaagggtttgcatgaagtagcggatcaattcttggcgaccaactagatagcgatctgggaaacgatagatttcgcggccatccgccatctgcatgctgtaggcaaccgtcccgtcttcattgtaaaagcggcgctcaatcaagttagcttgattgttcttaggaataaagtactctgtacaatagcgggtataggagaaataatcctttctcaccaaaatccctctagacacgtactcgcagcgttcgacataaggactgttttcttcgcgcaggtagcaggtcaaaaaattgtcctggtcctcataaaagaagcgcttgatcttgccgtcgacttcttcccgagtcggttttccggcaaaacctgataagacctgatcaatggtataggtcgttggcgcaatttttatatctgtaaaatggctatagagccagatgatttcatcatttttaaaaccgatattttctgttaaatgctggatattatcggctaagatcatatccataaaaacaaacttggctggttgatggatattgcgtaacaactgggcacggtaggcctgggcatactcaacaccactgctggcccaaccgattccaaggttgatattgtatactgtcataatgtcctcttttatgggaaatgcaagacaatttccccttttttattgatttctactcgacttagtaagagattgcggaccatttgttctttggccgcctctttcattcgttcaaaggattggtaggcttcttggaaaaattctaccaaagggtttttctgactggtgtactgaccagagagtgccatgcgcaattgttgcagatagtctacctgctcgacccagttttcatcgatagcttttaggatggccatgcgctggaattgggcgatcacctcatcggtgcctaagatctcatacttagcttccaactcgcttttagcaatctcccataagaaattctctttggttttcttgctacggaaggtttggtgggccttttccggatctacttggtagctcacattgtctaacatatagcgataaaaagctaccggttccttgtattcttttttatgggctacgcttgaaaagacggaacgaagaactttttcaacgatgtcgtccaagcgaccttcttgtttgatcaagcggtcgcgctcttcgtagacgatggcacgctgaatgttcatgctttccgcaaattctagcgtcatccgacgactggcctgaccagaactttcactagcattttgagcccgttccaccaagtttctatacttgcgcttggtcagagctttagctgaaccaatccgctcatccacatcatagtcttgataggtatcctggatccagtctggcccccagtttttcatcaaatcgtcttccaatgagacgaagaacttggtcaaaccgggatctccttggcgacctgaacgtccccgaatttgaaggtcaatccgctggttcatcatccgctcagttccgacaaccaccaagccacctaactcagcgactcctggtcccaacttgatatcggttccccgaccggccattgaggtcgcaaccgtcacagcaccttttcgaccagactccttaatgatctgggcctctcgaggagcattgttagcattgagaagattgtgaggaatcccttcccgcaaaagaagattcgaataaagaatcgacatctcaacggatccagcaaagaccagaattggattgcccttttcgtggaccttcttcacataatccagggaagccacgattttctccggcaaggtctgatagatttcatccggcaaatccttgcggatcttcttgcgattggttgggatcttgatcactgacatggcataggtatcaagaaactctgcctcagcgaccttcccagtcccggtcatgcctcccaacttccgaaacatcttaaagaggttttggtaagtaatagaagccatggcccgtgtttcttgggtcagcttgagaccctctttagcttcaatcgcctggtggagtcctccttgcaagcgcgtcatttccatcaagcgacccgtcgcctggtctagtaagacaatctccggttgcccttcaacattgggatggatgacatagtccttatccttaataaagtttttattggcctgcagtgctaagctgatatggcgaaccaaatcacggtattggggatcatagaggttgggaatagcaagaaaagcttctgctgcatgagctccttttcgagtcaaccaaactcgtttcttttcttcatcaaacttgaagtcttccccttctttgaaggtttggatcagggtatcaataatcccataaaggttggactgaacccgaggagaaccagaaataatcaagggagtctgggcactatctagaagcaccgaatcaatctcatcgacaatggcgtaattgaagtcagctaaaaactggccatctgccgaagccgtcaagttctctgttaaatagtcaaagcccagactagtattggtcgtgtaaatgacatctgaccggtaaatctcccgtttgacttctggatctaattcttcgtcttcagattgttttaaaggaacgccgacagtcaagcccaaaaagcggtagacctgtcccatctcttctgcatcccgagttgccagataggtattggtcgtaataaccatgacccctttgccctctaaggcattgagataaactggcatagttgccgtcaaggtctttccttcaccggtattcatttcagcgacattgccttggtggaggacaattcctcccatgacttgcacgtcataaggaaacatacccaagacccgtttatcggcttcccgcgcaaccgcaaatgcttccggtaagagatcatccaaggtctcacccttagctagacgttcccgaaattccacagtcttctcctgtagttgtcgatccgtcaagcgggccatgtcatccttccagctattgacttcttttaagatttttttgatgtttcttaatttaacgtaatccaatgtaatcctctttttttgcagtgatgttcgtctattcgagaacttctgctccctcagacgatattggttgaatcgtgaaatagtggaaggtaaactcttgcaaacctgcactgagcaagcgtacttcataggcgtatgcttgatctggataggtaaacggcaagcgaccttctgcggttactcgacggccaacgacctctccaaagcgatctttgaagacgatttctaccataacggtatgagcaggagtcgcttccatcgtgataaccaattcataatcttgctctcttttgagcaggggcagactaggaatttgacgagttgcgccaaaatttgtctgcgaatgccaagttttcagcacttgaccagatggcatgagggggttctgaaactgaacgcttccttgggcagtcacctgaatggtcgacccccaaagataatctgctagaacagtatcgccccagtagattcgtctgctttcattttcttttatttttatcattggtttcttccaaagtctctttccatgatttctttgtactgggtcacaaaccactcaatgatcggaccactcgcatcattgtgtcgaccagcgcggctggtactgataatacgaaccggtaattcatacaaggcttctaaaatatctggataggcctgctggtcgtagtcatcatcccgcatataggcaagggctaaaatggtatccttaaagtccgctttttcaaaccggtcccagaaacgttgattgagctggccgatcccttcttgtgacacttgcccaatgatcaactgcatcatgtctagagacgttccaaactcatctggacgtttaaatttcagattggcagcgacatcccccaggttgacaatgggttttccaaccaagatcgcatgaggagaataaagagcaccatagtaaagggcaccaaaggtccccatggacaagcctgagaaattcatatctttgggctcaaagccgagcaagtccaagtgctgatcaataaaggctgtgatttgattttctaattcttctgatcccatataaaaggatccaccttccagtcttgggtcagaaaagagaataaagggactacccatcgcacgcatcatcccaaacccttcaaaaccttcggctggacgatacccagaaaagtaaatgtttaaaggggacttcatatcgccaggatggaaataagcaaaaatttcttggcgtttgtggtcccgtagcgtcttagctcctacggtcatctctcctaaaggtccatgtgacaagcgcttatgtagggctccgatcgtaagcgtcccttctccttttgcttccagcgaaaaggctaggtaataaggctctgctccatccaattctaagggttgctccatctcttcttctgaaaagactgcatctttgacccactctcccagagcaccaaagcggtaaaattgaatccgcaattgcagctgacagcttggatctttttcatattccaaccaaaaattgatgggacggctagcatcatacacgtagttgtagacccactgagcaatcggtgtaaactcttcaccgtatgatccatctagcttcagaaaatgttgccccagcaccgtttgctggccagcaaaatccggtctcactcgcaggtcacgaaccgtaaaggcatctccatattgattgtcgtataaaaagcgctctaagacatagagaaattgatgcttgcttgagaaatcccagggtcttgcttgtttaagccttaagaggtgggccaattcttcagaaggcgcctctagttcatggctttcatcataaaaaacggtatacggctgaaaataagctaggtcttctcctaaagctaataaatcttctggcttttctagaatcaaggctttgaatttggagatttcctcttcttccatatattctttgagcgatggaagagcggtagcttgaaaaaagtgccagcctagtccagcaggaagctccacctgatcctgccagctgcttgagccgatttggagaatatggggtatttgtagttttttatccatgacgttctttcatccatccttcccatttctcgatcaagcgttgaccagtgtattcttgaattttttcgatcgagtagaccaaggcttcgttccaaggcttcaattccaacaaaaagtgagtaatcgccttctctaattccttgtctccctttgataagacatagccatttttcaaatgatcgacatattctgtctggacgcggttgacctgaggaatcccagcagagatacccgcgatttgcgtgtagaggttgggttcctcgcttaaatctacgatcaagcgggttttttccaactcttgaataatgtcattttcatttgaaaaattcttaactataaaacggtagtctggtgcgtcttgtagggactcttcatcaataatctggttttccccaagcccttccatttgggctggtgattgaaccagatgcaagtcctgctcgctagcgatcaattcctcgagttgcccttctaattccttaacacgctccggtgatccattgtaaaatgcaaaaacaacttcaaataaaggatgttgcgccaacacttccagaaccttcttgagctggctcttacttggaagctcggcttcgttgacataaaagtaaatctttgattccttgcgttcctgactagatcccaaacggaggcgggaatcaaaagaggtaatccggtgtgtcttttgagccaagctaggagaaaagactccaatcgcttctttggttttttcactatctgtgatcaagagctgggcatcaatcatatcaaaatagagggcaaagttttcggcagacaagggctgacgatccccatagaaagacaagactttcttgacgctacttgccgtatcttgtaaaaaggccaaatttgctggatgagctgccaaaaccaactgatctcgtcctggaaccaaggttgctaactgctctttcattttttcagcgacaacgtctcccatattggcatagctttcttttttgaaggcatgaaagaaagcttcattgaccatgacggaatggttctcttcgatcaacatctctctcaaaacccattgtccatcaaaactcagatactcttgaaaatagggttttccctcattgtagtagatcctactagagataaagccacgatcatctaagtactcgatgtagctgatctcgtcattcttataacgggtcaaagagagaaggtttccatccactcccatatcaatttttgctaggtggtggccctttcgaaatgccatcaccaaaaagggagtataggaaaaagtggtctcactcggccattcgatgtcctgaagctgaactgggcgcatagccaaatcagacggaacctgttggatcttatcaaaaatcgaaaggacatctgtctctaacaaatcttggcggtgtaaaaaatagcgcagttgtggactatattgaggcaacaataagatccgatccatttctgcttcttgaaaaatacgaacttgattaatggtatcgtcaaattcaatggactctcgcatccagtaccaaggggtagctgtttgctgccagatgcggtccgttccataccaggctggtacaaaataatacatggttactcctagaatattcttgtataacgttgattcacacgaagggcacgaatttcttctcggatattgtaaatcatcccgacaaacatgaggaaggttcctggaatcatggtcaagcgcaagagatccttatcccataacaggagagaaaaaggaagcgccgtgaagaggatcagatacaaggtcccaaaaaccgtcaagcgtagcacaattttattgatatagcgacgtgtatctgctccaggatagacatgatcgatatactcggaagccttcatcatcttatctgcaatttcttctccgttcacattgacaaaggcaaaagcaaaagagagaagggcgatcatcagaatgtaaagaaggatccaaatcggatctcccatcaccaagtgtttggctaaacgagcagcccacttggcattggaatccattgacaagatcaagagcatagcatactgaggaatggacaccaaggtcatggcgtacatgaagggcatccctcctgccgggttgagcttgatatccaaaaaagtataacttttcaagttgttgtggatccctaatttattgacaggaatctggtacttggaatattccaccaagactgccacatagacaaaaatcaagatgaaaatcacgcccagaacataagcgatttctggaatattattgacatttgaaagggtctgcatcacgtcttctggcaggtacataaccatcccagccatcatgatcacaacagaacttccaagccccaaagcggcatttagatcggagagccaaactaaaaagaaggctccagccaccataatcatggtattgaccgcaatgacaagtccggggttcaaccctgtcttcaaggggagatacatggccactgccaaagactggacgatggcgagcgccaaggtcacgtacatctttcgccgctccacaatctccgtgctggttttttcgaggttaaagcgttttgaaacggtaaacatccgccacaaaatcatggaagacatccatggggatagaccgatcgaaaagatcgacatcccacggaggtttccccccatcacagcgcttgagagctgcaagcccgttgtcgttccctcattgagtctcaaggcctttgataagtcaacaaaaggcagggaaattttacttcccaaaacataaataaagacgaaaaatatcgtccaacaaaatctctttcctacttcagatcgttttaacatttcttttaaactttctcttactcattttgactcttccaccagggaaacagcctttaaatatgtgcctttagagcattttatctcaacttattttaccataatttgcgacttttccaaactcatttgtcactaatatttgataatatttcaaattccccatttggtaccgtattcaacaaaaaatccttcagatgtttatctaaaggattgtttattgaatgttattcacccaagaccatgatggtatcgacgaataatttctttgtaaaatagccattgcggaccaaataagaagtatagtgagctttttggaccatttgggcatacgtttcctctgtgcagtcttgaaccaaacgattggcttcttcaagactggatgctacaaagccaagccctttttctcgaatatagtctgcatttgacaaatagtctggcacgactaccggaagacctgcggataagtaagtcgataatttgtaggaaatattttctttgtagtaatctcgctcatcctcggggttctctgaatttccccagaccagcccaaaaccacccttagaaagctccaaaagcaactcttgcttggttcgccagccttcaatatggaccttggaataatcaactccttcaactggttcggtatagacatgaaggggtgtatcatatttccagtcgatgatatgagggaaacgcgaaggatttcctgagaagatcagttttttctcaaattgcggggtatagagatccaaactgtgggtcaaatcccacaacttttgtaccacatattttttaactgtaagcccttctgatactagacgatggtacatttgctctgatggaacaacgaccagatcactctgattgtacatgtcgatatagttgggcatcaggtaataattactctcaaacataagcggtgggacatcgtggataaacatgaccaacttggtttgaaggagttttaacttatcaaccaaacggcggtcccactcaatcccattccaagaaggcgattgaacgaagacgatatccccaaaagcaacgcctgctaaaatcccatccattcgcgagttcaattcactagctggttcattgctatgatcataaaagtagatccctaattcattgaccccaagctcgcgaacgacattcatgatatcgttttgggccatcagggccacgctctgagaagactgcccgaataaatttgtaaaatggattttcatctctttcctctgactcttctttttttatcccatatttcctgaagatatgaaggcaaactgagcttttcacaaagcaacctttttcatccccttcaacgaaaacttcctcattcattataacatatttcacaacttcttagacattctagatcaataaaagaccggtaatatcccggtctttattcatgatatttaataccttatttgccatcttttttccggattcctaaaagggctaatccagacagaagaatggaaactaccgtagcaaggatatcacttgaaggatgggttcctgtctctggaagagcaggtcctgaagaatgcgtcgcacttagcgagcttgcatctgatggagattctgagtaagaggtgcttgatgaagacacgacagactctgaaggactggtcatagcagagaaacttgacgcataagacacactgatccattcagaagcttcatgcgatagggattgactctctgtcgatgatgcgctcatagattctgagacactcgtcaaagggaactcagacactggcatcgacgttgaagtagattcacttgcagaaaaagttgattggctataggagtcagacttcgatagcgaggctgacgctagagattctgaatgagatgcccattgtgaagcagatagactctctgaaactgatcgagagaacgatacagactctgagacctgcgatgcagctacgacattagaagttgaagctgatttgcttgttgaggcagaagcttggactaacgaatctgattgactcgcggaaaccgaagcttggatcaacgactctgagtggctattagagatcgaagcttgtatcaacgattcagactgacttgcagaaactgaagcttggacttgtgactcagattgagttgcagaaatcgaagcttgaaccaaggattctgattgacttgccaaaaccgaagcttgaaccaaggattctgattgactcattgaaacggattcagacagctttttagattgcgacaaggaaatcagttgagaaaccacttcttccgatccaaccgccgatgttgactgcgattgagacatagaaatggatctagacgctaaatcagataaggataccgactgactcaacaaaacagatttcgaggctttttcagactcactcttagatgctgattcagaagctacttttgattgcgattcggattgactagctgagactgacgcttggaccaacgagtctgattgactgacagaaacggatgcttgaaccaacgagtctgattgactggcagatacagattcctgaaccaaggaatcagactgactcgctgagactgactcttgtacctgcgaatcagactggctcgcagaaactgattcttgaaccaacgactctgattgacttgcagatgcccgaaccagtgattcagattgactcatcgaaatagattgcgacaaggaaatcagttgagaaaccacttcttccgatccaaccgccgatgttgactgcgattgagacacagaaattgatctagacgctaaattagataaggataccgactgactcaacaaaacagatttcgaggctttttcagacgcacttttagatgccgattcagaagctacttttgattgcgattctgattgacttgcggaaatcgattctttaatcaatgactctgattgactcgctgaaatcgactcttgaaccagcgactccgattggcttgaagaaactgattcttgaaccaaggaatcagactggctggccgaaacggattcctgaagcaacgactctgactgacttgcagaaaccgacgcttgaactaacgactctgactgactggctgaaacggaggcttgtaccaaggattctgactggctggccgatacggaggcttgtaccaaggattctgactggctggccgatacggaggcttgtaccagtgactctgactgacttgcagaaactgattctttaatcaatgactcggactgacttgctgatacggattcctgaagcaacgagtctgattgactagctgaaactgattctttaacaagcgagtctgactgactggcagataccgattctttaacaagcgagtctgactgactggcagataccgattctttaacaagcgaatcggactgactcgctgaaacggacgcttggactagagcctccgattgacttgcagaaacggaggcttgtaccaatgaatctgactgactggctgatacggattcctgaaccaaggattctgattgacttgctgaaacggattctttaacaagcgaatctgattgacttgccgatacagattcttgaaccaaggagtctgactgactggcggatacagattctttaacaagcgaatcggactgactggcagaaacggacgcttggactagagcctccgattgacttgctgaaacggattcttgtactaacgactcggactggctagcagagactgaggcctgaactaacgaatccgattgactagcagaaacggattctcgaatcaacgaatcggactggctagctgaaaccgaggcttgaaccaacgattctgactggctagccgatacagatgcctgaaccaacgaatctgactgactagcggagatcgattcctgaaccaacgagttggattcacttgtcgaaacagattgtgacaaggaaatcgaggttgaaacctgtgaatctgattgactggcggagctagatgcttgtgacaaggaaacggactcactgaccgaaacagattgagaagatgaaatggattctgaaactagtgactctgaagttgaaatcgagaagttttgagattgtgaagtagattctgacggtgtcatcttccgatagtaataattcacactcgttaaggggtatgaatctactatttttttgatcgtttgtttgaagttggaaaaaccatctgctccttgaggtgttgcatcttctccaacgaccatggtcgtatttttatcgaggtaggccgattttggaagttccgtgaatggttttggaacagtatattctattcctgttttctcatcagtgtatgtaactgtctccttactagagaaccaacctgtaatatccaactcaaaatgttggtaatctattcgttttggtgtaacattcaggaaataatccttgtttttactttcaactttacgagttccacctaaatctgaaaggttatccgtactatcttgtttaaattctttttcataaacaagtgtatatacatcggttaccttagcatttcctacatcaccactactaacatcatggattttagaaggatctaaaacatagtagcgaagagaataatcaccattttgattaagggtgacaatttcacttttaatgaaatgctcacgcgcatcccctaatagttcaactcttgatttcccattcttactattatcgaacaccccacttttacgattcgggaacacggtgtgcgctgggacctgtacataaccaggaaattcgcgtggattggaagctgtataatgctgaccttccaatccgtagattctatactctagtaaggatctttctttccccgttggttcatattccccattaaaccatctaccattcgggtccacttctctatagaaggtcgattgttgtctcatcatagatggaattttgatactaggataggtcctaatcacttgcccttgattctcaggcgtcatgacatcataaatactccggaataagaaagcctgttccggaataaaattcgtcagcattccaaaagtcccattacctgtagtaggtttcgaattaaaaaccttgttcccaaagggagcctgaccaatcagtacttcttttggtaattgaatatcttggccatatccttctggagatacagtttgtgaaaaaatctcaaccccatctgattgccgaacaatgcggaaataaacatccattgccttatgcttttccggatctatctcactgatatcaatcgacatggtcgcatagtaaccaagtgactctccttgtttattcacaaagtcccaaataccaaatgtataacgattggtgtagggttcacctaaaaaatttttcaactcttcaggcgaaaatcttaagagatctttatctagatgaggatccttagcatatcctggtgtgtccagtgtaggatcttctacactcgcaccattgggatcttctgggttcggggtcatatccaatacatcatcagccaagtatgtttcctcagctagaggagccaactgagcagagatcgcaggtttcccatctacatttgtatttcccacaaaacctgcagctgtcaaggtcgtcatcatctcatcgacagctttctccaaacgatcgcgctggtcagcataagcttgcgcactggcattggtgtggatcaagttattgcttgcagtcacttcggcctgcactttgttaatgaccgcttcgaccactgctcggcgatcggtgtccgtcattttagatgcgtaattccctgcaatttcttgaagcaattcagcttcagaggtattttgttccaaaacaacagcttcttctaaactagtcggctcttcaacaactacctctgactctaaagcttgagcagactcgctaagtgccgttgataatgcagttgatccaacttcgcttaaggacaaagaggtggattcactgatcgaagcagacgcactctcagatgtagaaaaactagccgattctgaaacagagatggattctgaaggctggtttgaggttttcgctaaaaccacactatccacttctgccaaggtttcctcttttgtctcagaaaccgttggtgcaagtgatgttgcatcctccgccttagcagtcgtagcaagcacagcaccaccaaaaacagtccctaccgtaatcaaaccctttaagaaggcttggttatgcttttgactttctatttgatcttgctgtacgttggcaatgatggtctcctccacttgcccacgcaccacgcgaaagaggcctagagcagccgttgatgcccgaagccaattttttcctgatttaattaatttgaagcgtacgacacgatctgtttcacgaaagtttccttttgaacgcttaaattgcatgatattccccttacattgtagtcattattcattatacaggaatactacgtagattcaagtaatttgctacaaaaaacttctatattattgtttaattttcaaatttttttgtaacacattaaaaatacttcattctactagtaaaaaagtgaatctcctatgagattcactcgaaaaaatgatttttcctactagatcagttctccttctttttacgtcgggtaagtccagcaattccagctaaccctgtaactaccccaagaagagctgatgttacagatcctgtttcgccagtatttggaagcactacagattggctgtgtttttgtgaaccacttgctgattctgatgcagacaatgactctgaatgagaaattgattggctcattgagttagagtatgaaccgctaccagatgttgagactgattgtgattgactcactgaaactgaagtacttactgatgttgaagttgattcatgtgcagaggtgctcaatgatgctgactcagatgcagatactgatgtcgaaactgattctgatgtagataccgactcagatgtagagattgattcggacgttgaaactgattctgaggctgatactgattctgacgttgataatgactcagatgtcgatgctgactcggacattgacactgattcggatgttgaaaccgactcagaggctgaaattgactcggaggttgagactgattcagaagttgaaactgattctgatgtggacaccgattcagagattgacactgattcggatacagaaactgattcagacgttgataatgattctgaggccgatactgattcagacgttgatactgattcagaggttgagaccgactcagaggttgagaccgactcagatgttgatgctgacaatgattccgaggtcgagattgattcagacgcggacaatgactcagaggctgaaactgactctgaaatagagactgattcagacgctgaaactgactcagatgtagagattgattcagaggttgagactgattcggacaatgagactgattctgatgtagaggccgactcagaggctgatgctgactcagatacagaaactgattcagacgctgaaactgactcagaggtcgataccgactcagacgttgaaattgactccaatgctgacaatgattcggaagtcgaaacagattcagaagtagacactgattcagaagttgataccgactcagaggctgaaaccaattcagatgttgatgctgattcggatgttgaaactgataccgacgttgaaactgattcagaggctgagactgattctgaagttgaaactgattctgatgtagacaccgattcagaggttgacactgattcggatacagaaaccgattcagatacagaaactgattctgatgcagatgcagattcagaggtagacactgattcagatacagaaactgattcagatacagaaactgattctgacgctgagactgactcggatgttgatgccgattcagaggttgacactgattcggatgtagaggccgactcagagactgatgctgactcagatacagaaactgattcagacgttgagattgattcagaggctgaaactgattctgacgttgacactgattctgatgctgagactgactctgatgtcgataccgactcagacgttgatgctgattcagaagtagatgctgattcagaagtagatgccgattcagaggttgagactgactcagatgttgacaatgattcggatgttgattcagactctgatgtcgaaactgaaagcgaagtagagactgactggctttctgatactgaactgctcaacgaggctgacaatgattcggaggtcgagattgattcagacgttgacactgattctgaagtagaaactgattctgaggcagagactgattcagacgttgaaactgatttagatacagaaaccgactcggatgtcgacactgattcagatgtagatgctgactcagaagtagaggctgattcggacgtagacgctgactcagacgaagaaactgattcagacgttgatgctgattctgaggttgagactgagtctgaagtagatgccgattctgacgctgatactgactcagacgctgacactgattctgatgttgatactgattcagatacagaaactgactcggatgtcgagactgatactgattcggacgttgatgctgattctgaggttgagactgagtctgaagtagatgccgattctgacgctgatactgactcagacgctgacactgattctgatgttgatactgattcagacgctgataccgactcagacgttgagactgattctgatgccgatactgactcggacgctgagagtgattcagaagcagatgctgactcggacgttgacaccgattcagaagttgacgctgattcagatacagaaaccgattcggacgttgacactgattctgaggtagaaaccgattcagatgtagaaactgattctgaggtagaaaccgattcagatgtagaaactgattctgaggtagaaaccgattcagatgtagaaactgattctgaggtagaaaccgattcagaagtagacactgattctgaggttgaaaccgattcggattcggacgcagaggctgactcagacgttgatacagattcagaagtagacactgattctgaggttgacgctgagactgactgactttcagatactgaggtgctcaacgattcagacgctgatactgactcagacgttgatactgattcagatacagaaactgactcggatgtcgagactgatactgattcggacgttgatgctgattctgaggttgagactgagtctgaagtagatgccgattctgacgctgataccgactcagacgttgagactgattctgatgccgatactgactcggacgctgagagtgattcagaagcagatgctgactcggacgttgacaccgattcagaagttgacgctgattcagatacagaaaccgattcggacgttgacactgattctgatgtcgatacagattcagaggttgaaactgactcagacgctgagactgattctgatgctgatgttgattcggacgttgagactgattcggacattgatacagactcggatgttgagactgattctgaggtagatgccgattcagaggttgagactgactcagacgttgacgctgattcagatgttgacgctgactcagaggttgagacagatgctgaagtcgatgctgactcagagattgagacagatgctgaagtcgataatgactcagaggttgagacagatgctgaagtcgaaactgactcagatgctgaggctgattcggacgttgagaatgattctgaggtagatagtgattcagaggctgaaactgattcagacgttgaaactgactcggatgctgacaatgactcggacgttgaaactgactcggatgctgacaatgactcggacgttgatactgattcagacgttgatactgattcagacgttgatactgattcagacgttgatactgattctgaacttgaaactgattcagacgctgagactgactcagacgctgatactgattctgaagtagatactgattctgaagtagatactgattctgagatcgatgctgactcagacgttgatactgattctgaagtcgaaactgattcagatgctgacactgactcagacgttgagacggattctgaggttgagacggattctgaggttgagaccgattcggacgtcgatgctgattcagaaattgaaactgactcagacgtagacactgactcagatgttgaaactgactcggacgtagacaccgattcagaggttgacgctgactcggacgttgagacagattctgaacttgaaactgattcggatgtcgaaactgactcggatgctgagactgatgctgaggttgaaactgattcagaggtagacactgactcggatgtcgaaactgattcagacgtagacaccgattcagaacttgaaactgactcagacgttgaaacagattcggatgttgaaactgactgactcaaggatactgatgcagactcagactgcgattgactcactgattttgaagccgactcacgagtagattgacttagtgactccgatactgactgtgaaaccaaggctgaagcagactgactcactgaaacaaaggcgctcattgaagcggatgttgagcttgagatagactggctaaccactttggatgcactcgctgataccgaagcagactgcaaggcactgacacttgcagaaacggattccgaaaccttcacagattcagattttcttgccgatacagattgactcgttgaagcggattgagattgagaaatctccttgctcaatgattgactgcgagatagacttgcttgagcggatacacttgccgatgctgattggcttagtgaagccgacaagctttgagaacgaaccaagctcagtgattggctcaatgaaacactctgctgtgtcgatacgctctgagattgcttctcacttaaagactgactaatcgattgcgaattcttcgtagatgcactctgactgtttgagacagactgactatgatcgctatctgacaatttcacagctacgacattggtcgtactatctttataagtaatggtgactgtaccatcactattaaccgtataggccttaatgcggttagccacctctggattaacagccgacacagctgcaatcaccttgctcttatctgcctctgtcaaagcagttagactcgtcacttgaatagtgcttgttggagcaacacctggcgtacgatcagcgagacgtccttgtgtaattcgaatttcacccaaaccatttgggcggttcatattggacgcattatcaatagctgcgacattgcgttgccatgtattacggtaggtatggtaaagatcatccttcaaatgaatggtcgttgtgatggttgcagggttcgtagctgttgccgtaatctctcccgtgataggagcaatatcacctgttccatactgactactaccaaagaaatttccgttcaaggcattgtcatttaagtcagctcttgcaacgactttcatttctttaagtttgccactgtcatctgtagctgtaaaagtcacaaccgcatcatcaccagcataaatggtataattcttcccaccaccttcaagaggggttgatttcggttccacaccattgacagttaacttagccatcacttcaggacgtgtggcatctgttacagcaaccatgttacttgcatcggaataaaccgcatgatcaccatacagaatgcgagccttagctgttactccacccgtctgtaagggaacattcggtgttacgatcgcttgtccagacgcatccgccactgctgttccgatttcatcatcattattgtacaaaacaacagcagaccctggctcagcccccgtcaccgttacaggtgtctgagtataggctttctctagtaagcgagtctcaaccgtcggtgctgctaggcgcttaacaggagcggtcacatcatttgtggtgttatctttataagtaatagtcaccacaccagatgatgaaaccgaataagatttaaaatcctttgaagtggcaatatttgggttagcagtcttaaaagcctcccaaactttctctttttcagcctgggccaagttagtggtatcattgacaaaagttgccgtcgtcacagccgtaatcgggtttcgaatgccatcattttgtggcaaaacctgaatacgaagcgtacgtgtcactgactgcttagccgtattcgtcactacaaaagaaagattataaatgttcccaggcgttacgacctctgtctgcccaacagtccccacgatattaaaaacagctgcactatttttcaaggccgatgtttgcggaacataaatgccattcacacgatcgctaccagaagcgtagccaatgctcttaatattatttcgtgtaggattggtttcaacaaccttataaacctgattgatgtaatcagagttatacacagaaatcaaggcattgttggcaggacctgaattatattgaggcgcacggaggctcgtatctgtgtcaatacggttcccatttcgagggtcgcgctgaccagatgtcgcgcgcagcaccgcgttggccaagcgattgcgagcaatctttgcttggctttccacggcatcgatttgaattgccggattagacaagccagttcgaatagcctctaaggccagatctccattctcaattgcagatgcggtccccgggatttccaaagctcgcgctcgataggtgtataaatccaaagccaaagtttgcagacgcttcacatggtcttccgagcgagtggtctgagtcgttgcttctttctcactcgtttcaggagtagccctgtgaattgaatcgtcctctgagagactgctactagcaaattctgatgtggactgactcgctgaatgactaacaacatgtgattcgctcaaagaaaccgactgagataaagaaaggctgtcactagccgactctgaaaatgagatagattcactgatagattgactggctgatacagaatctgtgatagaggtcgtccccaagacaagactatccgaacccgctacaccggtcgatgggctgatttcagacccaacagtcgcattcatctcattttcctcagcaaatactggattggcaacggttgtcgctccagcaagagctcctagcacaaccatccctttgaccagatctttaggcatagaagatgatgatgcttcatattgaaccacgatattttcatccacaccacctcgcatgacacgaaataggcctaaccgagatacagatgcccgtacccaattctttcctgatttgattaatttataacgcgtgattcgctccgtttcacgaaaatcacccttcgaacgtttaaaaaacatgttcgctccttaaatttagatatcgagttattatacactaattttccccaaaagtaactaattaagactagtttttaacacaaataacagcatacaaaaagagaacctccgggttctctttttggatcctttttcatttcccacatacctgaaatgaccgaatcaaattaggatagaagattatttttcatcttcctttttgcgacgtccaagtgctgcaacccctgcaacccctgcaactgctccaagaagagctgaagctacagatcctgtttcaccagtatttggaagttgttcaagagctggagctggttgagctggttgctcaggaactgggttcactggtgtattaggtgttggatctaccggtgtgtttggtgttggatccattggtttattaggtgttggatctaccggtgtatttggtgttggagttggtggcactggtgtgtttggtgtcttcacaagtttgtaaacgtaagtaacgttcttattaccttcgatgactttaccagttgttgggtcagttgtcgtcaagtgaccttgtccatcaactttacctactgggtaattaccttgtggtaccaattcatagactttaccatctggagttacgattgtcttaggacggttatccacaactgtatcgtagtctttacctactggttgatctttttcatccactactgaagtcttgatagtattaccattttcatctacatagtgaacgtatacattacccttaggttgagttggttcttctttcacttctttgtaaacgtaagtgatgattgagcgtggtttgtcaactttacctttaattggatcagatgattccaagtgtccatcgccatcaactttacctactgggtagtcacctttcggtacgatcttgtatgtcttaccgtctggagtcttgatagtattaggtttttcaccttcctcagttgtgttatatggtgtgtcatatggtgagtttggtgtgtcttgacgaggtttcttgatttctttacctttttcgtctacgtaagtgatgataacgtcaccttctttaggtttcgttggatcttccttaagtttgtagacgtaagtgacattcttatcaccttcgatcactttaccagttgtagcgtcatcacctgtccagtgaccttgttcatcgacttgacctactttgtagttacctgctggtaccaattcgtatgtcttaccttggaactcgattgtttgtggacggttgtctactactgtatcataatctttatcaactggttgattttcttcgtcagtgacatcgtctttaatcttgttaccattgacgtcaacatagtgaacgtaaacgttacccttcacttctttataaacgtaagtgatagttgatttaggtttgtcaactttacctttaattgggtcagatgattccaagtgtccgtcaccgtcaactttacctactgggtagtcacctttcggtacgatcttgtaagtcttaccgtctggagtcttgatagtgttaggtttttcaccttcctcagttgtgttatatggtgtgtcatacggtgagtttggtgtatcttgacgaggtttttgaatttctttaccatcttcttcacggatgtaagtgatgataacttcaccttctttaggtttcgttggatcttctttaacctctttataaacataagtaatcttagaaactggtttttctactttacctttgattggatcagaagtttcaagatgtccttcactatcaactttacctaccggataatcaccagccggtacacgttcgtatttcttaccttcaaactcaatgtacttaggttgttcatcgttctcagtagtgtcataaggcgtgttgtagtctgacttaggagtatcttgacgttggactttaatttccttaccatcattctcacggatataagtaataataacttcaccttgaggtttttcactttcagaatttgatgaagagttagatgctgattgtgatacagatgtagaaagtgatgttgaagctgatgtgctcaatgatgctgattgactagctgatactgatgctgactcagatgctgatgtgctcaatgacgctgattggcttgctgaagtagatgctgatgctgaagccgatgtgctcaatgatgctgattgactagctgatactgatgctgactcagacgctgatgtgctcaatgatgctgattggctcgcagatactgattcagatgctgaagctgattggctcgctgatactgattcagatgctgaagctgattggcttgctgattctgatgcagacgctgatgcagattcttgagctgatgtagaagctgactcagatgctgatgcacttgctgattcaacttctgattggctcaatgatgcagatgctgattctgatgcagatttagaagctgatgttgtatcagattcagattgtgatacagattgtgatttagacactacttctgattctgattgtgacactgattgtgatttagaaaccacttctgattcagattgtgatacagattgcgatttagacactacttctgattctgatgaagattgtgacttagacgctacttctgattctgatgaagattgtgatttagacactacttctgactcggattgcgagtttgatgcagagtttgagaatgattgcgattgagaagcagattcagaatcattcatcttaacgaagtaatagttcacatcagttgatggtttaatcgcagttggaattgagtagttgtttgagaatgatgaataacccttcaaattagagtatacttttccgtttggagctgtaggatcatccgctacagatccatctgcttggatttctggaaccttaccagcaatgacgttgtaactgttgttacccgatccagcaggtgtcaatgaaggatttggggcacctttgaatggacgtggataagtgtgtagagttccatccatttgtttataagtatctgtctcagtaggagatgaccaaccagtaataacgagtgatttgcttccagcagtttcgttgacttcaagatagtagtcaccatttttactgtttacttttgtaacttttgtctcatcagccttccactcttccccagctttattgactttactagtgtaaatgagtgtgtacttagatacatcttcagtaccaatatctgatgtagcaaaattgttaacctgagatggatcaagggcgtagaatttcgttacagttgagccatcagtatcaacgatttcagaaatacgtttcacgtagtagtggtttgctccaccttgaagttcgacaagtttttgtccaacaacacccttaccaaggataccagatgttttttgagttgtatctgttgtcgcagctacaggtttgtaaccagcaacatcacgatttcctgaggctgtgaattgttgccctgcaagacctgtttgagtatagcttgcaagaactgtttcatttccagttggtgtgtatgtttgaccttctgtgtacttgctactgtcaacgactttatagtaagttgtttgatcagctttagcataaggaacagaagtttgaacgttttgtttgtcttcaccttggttacctgggtagttagtatcacggatttgaagtgtttcatactcaaggttagcatttaccaatgagaaggtaacgttacctggattagttccgttagcacctgtgtaagtcaaagtattggttacatcagagttgttgtttgtgatgtagcttggaagtgagatattgctttctcccgctttgattgtacgagtgtaaacttctgaaccatcagacttcttaacgatacgcaagtaaacatctgggttagctgaaaggctacctgtgattgctgaacggtctactgaaagagtagcataataatcaaagtttgttttagctccagtagcgtggttagttttaaggaattgccatacaccaaaagtgaagcgatcagcgtttggatccaaagcatagccagcttcgttgaaggctgcatcttcaatcgttgcaccgttcgcatttgagattactggattagtatctacactaccagtagtgcttgttgaaattggtgccaactgtgctgaaatggctggagcaccattcactgttgtattaccagtaaagcctgctgcagtcaaggttgccatcatgtcatctactgacttgctcaagcgttcgcgttggtctgcgtatgattgagctgaagcattagcgttgatcaagctgttgcttgctgtcaattctgtttgaactttagcgatggcagcatcaagtgctgctttcttttctggagctgaaacagttgctgagtagtctcctgcaatcttgttcaacaatgctgcttctgaagtgttttgttccaaaacaactttatcatcagctttagcaacagttgtcgatgcttctgaagttgcttcagatccagctgctacagttgattcgctaagagctgctgaaagttctgctgaaccttgttcgcttaatgaagctgagtgagatacagatacgcttgtagatgttgaagcacttgctgatgcagaagcgctagctgattctgtagttgactcagttgttgattctgtagttgattcagattgagattcagttgttgaagttgtaccaagtacagtacttcctcgttctacaagagcttggcttgaaagctcagatgctgttgcaacgtctgaaccattatcatcagctttagcagtattcgctactgtagctgcaccaagaacagcccctgctgccacgatccctttgagcaagcctcggcttgtcatttctgttgctgatacttcatcttcacgaacttcagctactacagtttcttcgacctgaccgcggatgactttcaaaagaccaaagttagaagttgctgcacgcaaccagttcttacccgacttgatcaatttaaaacgagtcacacgatccgtttcacggaattcaccgttcgaacgcttaaaaaacatttctgtctccttattacattttttatttccctaacattatagactaatctgtcgatttttgaaagtaattattcttaattattgctatttttttataatttttgttttagatagtgataaaatcgttttcagtaggatcgatttgtcaagtcggggcaattttttgaaaaaatcctataatactttgactttagaagtaaaacaaaaagccccatttaataggggattttctgataattatctgattttttccaacatactttcaatgtgttggatggatttctcgcgtccaagcaagtagatggtatctggcaattcaggaccatgcatctcacctgaaacggcaatacggattggcataaagagattctttcctttgataccagtttctttttgaaccgctttgatttgtgggaagatattttcagccacaaactcatcgtctgacatggcttcaagttttgccttgaaagcttcaaggacagtcggaacggtttcaccagccatgacttctttctcagcttctgtcaaatctgggaagtctgagaagaagaggtctgtcaatggaacgatttcatccactgacttcatttgtggtttgtaaagttccaccaatttctcagccttgtctgtcaaacgtcctgcttcttcaaggaatggtttggccatttcaaagatagtctcaagatccgcattcttgatatactcattgctcatccagtccattttcttttggtcgaaagctgctggagacttgctgaggcgattttcatcaaagagcttgatgagttcttcgcgagagaagatttcgtcttccccaccagggttccaaccaagaagagcgataaagttaaagactgcttctggaaggtaacctttcttccggtaatcttcgataaattgaagagtgttggtgtcccgtttagacaacttcttaccagtttcagagttgatgatcaaggtcatgtgaccgaactctggagcttcccatccaagagcctcataaaccatgagttgttttggagtgttggcgatgtggtcatctccacggataacgtgagagatttgcatatcgtggtcatcgatcacaacggcaaagttataagttggatagccatctttcttttggatgacccagtcaccaccgatattgccaccttcaaactcgatatcgcctttgaccatgtcatgccatttgtagatacctgactcattgactgccaaacgaaccgttggaatcacacctgctgcttcacgttctgcgatataagctgctttttcttcttcgctcatgccaaggtattcattgatatagcgaggtgtttcacctgctgcttcttggcgttcacgttcagctgccaactcttcttcagtgacgtaagatttgtaagcttttccttccgccaagagttggtcaatgtatttttgatagagttccaagcgttcagactggcgatagttttcatgcgtctcaggactttcatcccagtccatgcccaaccaacgaaggttttcaagctgtgaacgttcgccgtcttcgacgtgacgtttgcggtcagtatcctcgatacggatgataaaggttccaccatggtggcgcgcatacaagtagttaaacaatgctgtacgagcatttccgatgtgtagtagtccggttggacttggtgcataacgcacacgaatatcttttgccatatttctctcctcttatcttgttcgctatttctagctcatttttcaatcgttcctattataccacaaagaaagcaggactgaaatgaataagtgacctttctagcctttcttcctatgtataggaaaaaagccagaacaaatgctctgactgatatctaatctatttgtatcttattaaacgaacacgggctgcggattgtgtcaaaaagatgaatcctcctagaatctctcggattctgcgtcgaattccctattttgactgtatccgctacgccctttgtatcttattttaaacgttcttctaattcaaagtcgattggtagggtttgtaaaaagtgctccaactcacgttcccagtagaaccattcatgcttgcccgggctgtgggtataggtgacatccaaacctaacttttctagttccttgacttcaaaattattggcctcataaaggaaatcctgctccccacaccagatccagagtttggtcttcttatctgaaaacttcttggcagcagtctctagcgaatagggactggtcgtccaatcctcaatctctccaaagatccccttccaaaaagctggttgttccaagtcattgttttcaaagtcccgatcgtggaaactcagagcaccggaaaaactagccgcatgggagaaacgatttgtcttgagagccaagagcatcgatccatagccgcccatggataggccagcaataaaggtcttctcccgtttcttggtcatattagggaagaagcgagaaagagtctctggcaattcctccgcaatggccgtgtagtaattgtagccatactgggtatctgtgtaaaagccattattggtattgggtaggaccacgatcagattggtattgcgcaaaatgcgctccacattggtccgtttcaaccaagagtggtggttgccattcatcccgtgtaagagataaaggactgggatatccgtatccgctggatcttccacgcgcgacgcatcgggataaaggacagacacaccccactccatcttcaaagcttctgaataatactcaatctgcataactgccatttgatttcctctttctactgttaaaaacactcggcaagcctctggctgccaagcatttccatttcttctattattttacttccatcacaactggtaggatggctggacggcgtttggtttgttcaaataagaacttagacaagttgtcgcgtaccaaaccttttaactcaccccagtcaaagctatcttgattcaaataatcttcgacgctttggttgaccaattcgcaactttcacgaagaatatcccgacttttcttgacatagacaaaaccacgggtgtgcacgcgcgctttggaaataattttcttctctttgcgattcacggtgatcgctacgataaagatcccgtcttctgacaagaccttgcggtcacgaaggacgatattgcccacatcaccaatggcattcccatcgatcatgacatctcccgctgagacactaccggcagggacgaagtcccccttttcatactccatcaccgttccgcgttttggaataaagatattttcaggcaagataccgacttccatcgccactcgtgcatgggcatccaattcgcggtattctccttggattgggaagagatatttaggaagaagaaggttgatcatcaactgcaagtcccgcgcgtttccatgaccagatacgcgcaagcttgacgtgatcaatttgacaactccacctgcttgatagatcatgttttctacacgtgccaccactgcttctttggcaatagacggcgttgtgacgatgtagaccaagtccccatctttgatttccacatagcggtgacgaccaatcgacatcttacgcaaaccattgatcggttcacccatccggcctgtttccaaaatgatcaattcatgatcctcgaaacggctcatttcttttggcttgatcaagagtttttcgttagcaagagataatttattcaagcggatggctgtgcggacgatattttccacatcaaaccctgtcaagaccacccggcggccagtcccagctgcagcatcaaagacctgctggatccgagaaaggttgctggctaccgccgctacgatgacacgaccatcccagtccgcaatggtatccaggatttcatcgcccacttcttgctcactagcaacttgcatcttgctatccgcgttagccgaatcactcaggagggcaagcacaccctcacgtccaatctcagctaggcgagcaaagtccgtcgcataagactcgctggcagtttggtcaaatttaaagtctcctgtgtagacaatattgccctcaggagtgccaatcacaatcccgatactttcagggatggagtgggtagtttgaaagaaagatacgacggcatcgccaaaatcaatctcagaattttgatcgatgacatggaagtcgttgaatttcttaacactgtcattgcttttgacaaagagtttagccaactcgatggtcaactctgtcccaaatacagggacttttgcttcagccaaaagataaggcaaagccccaatggcatccgcgtgaccgtgggtcaagaaaacacccgcaatacggtccttattttcaaatagataatccatgttggggatgacgacatccaccccaagttgctcattttctggatacttcaaacctgcatccaagacaaaaattgaatcgttcacttcggcaacgtagagattttttccattttctcgaacaccgccaagagtgactaatttaatactattcactgttgtctcctttagtgtgattattttaatacttacggtccttggttgcccaagtcgaattacagctttgcaaatacttgcatatccactctattatacaatttttttctctttttttcaaaaagctttccacggcaaaaaagtcctctcatctaaagtagatgagaggacttctaggcgcctatttttagggggaaaagaccctaaagatggtaatctccccgtttattttcaatgatccgcatagctgccttgatcacatgaaacttgcctaacaattcctctaggcgctgactatttcgctcgctcaattggccgttcttgaccgcttgggacaggcgataaaaatcatccaagtcctccccaatgttttcaaacagctctttggcttccttgagtcggtagcgattgactaggtggttcacatcttttttgaaggaagcgacattgttttcgtgaatgtccgtataggcttcctcttcttccttagactcttggtaattaaccgccttaaagcaggtgataaattcccgacttttgatattgcagacaaagatgacgccatcactggctacataggcttctgtgttggcgggttgaaccacattactatcataaggagagagggaggagaggtgttggttgatccacttattcaagtgctgatcatctacgccaaagcgctcaaaagctctttgccgaaaatggtcccgacaactatattcttgcgcatacgacaatcccatactctcacctcctcctgagtattttataaaaatggcctccagtcttacgggactagaggcctggtctgcttcactgacttggtgcaattaaccttttggctaacaaaacaatgtttatgatgttgatttcatttaatagtatttgtgtaaaataccagaggttttctttgctatcctaaatccaaatgattagttttcgactggacgcattgaagtttgaaaacctttacaaaaagcttctacctactatttccacgttttcttatgtctccggacaaactaagcaggtttgcccgaccgtccaaccgatccgacacacacgacatgactgctcttttacgataagagcatgaacagatatcagcaaaacaggcctaaaacgaagtaacctaaattttaactcgataaggcattggtatcaatcccttctttatctttctaactatattatactcacctacctgagtatttgcaagcgatttcagctgaaactagttccaatttttatgcggttttattgatgatttaagaaaaagaaaagaggctgggacaaaagtcctagcctctcaattatttttggattgtcgagcaagacgcagtggttgagtgggctctagtacgctgatttcatcagcttttacagccctacttaactgtgcggaggtgggaggacgaaatcgaattctaacgaattaccgatttctgtcccactctctagcatgcagacaaactacttctacatcaaacaacctaagtgatgtcgcttctgtcctactcccattttacgggctttgtatcttagtctttctcaaacaattgatagtagtctgcgatggtcatttgggctttttcttcttgattgaggtcttggacgatgtgtccgtctttcatgacaatcaagcgatttccatatttcaaagcatcttccatatggtgagtgatcataagagctgtgagggcatcttgtttcacaaactcatccgtcaaggtcatgagcgcctgactggttttgggatccaaggcagcagtgtgttcgtctagaagcaagagttctggacgtttcagtgtcgccatcaacagactcaaggcttgtcgttgcccccctgatagaaactcaacggctgtatcgatatgattttccaagccattgccgatcttagcaaggactgtttgaaactcttctttatagctggccaagtgacgcggaatcaagccacgtttttctccgcgaaacttcgctaccaagaggttttctgctactgtcatgcgaggtgccgttcccattttaggatcttgaaagacccgcgataggtacttggctctcttttcaggagaatagttggttacatcttcccccaaaatataaatcttcccactgctcaccggaagcgtcccagcaatggtattaaatagggttgattttccagctccattgccccccaaaatcgtgataaaatcatgctctcgaatttccaaggaaacatcatccagaatgactttttcttcgttcatcccattgctcacggctttggttacattttttaattctacaattgctgtcatttactgagtttcgctcctttcatgatttttcccttaaaggttggaatcatcaggcagatagccaagatcaaggcactgaagattcgaatatagctggtattgatgccaagcgcaatcacggcccaaatcaaaaattggtaggcgatcgatccgatcgcaatactgagcaagcgctctgtcaaggtgacatttgaaaagagcacctctccaataatgaggctggcaagcccgataacgataacaccaattccacgtgaagcatccgcatagccttcttgctgggccatcagtgcaccagaaagagcaataatcccatttgaaatgaccaagcccatcaattccatccggtctgtgttgatcccaaagctcttggccatatctggattgtcccctgtcgcaatataggcttgacccaagcgtgtatccaagaagaagatcaaaccaaggatcacaagcgtgacgaaaatcaagccaatcagaatctcattgaacccactggcaaaaggaagaaattcctgaatttttttatagcccagaagtcccaaattggcccgctgcatgacaaatagaatgaccgagttacaagacgtcatcacaaggatccctgataagagtgttggtattctcccttttgtgtagagaagacccgtcgcaagtcctgccaagcaccctgctccaatagcagccagcgtcgcaaggagtggattgacccctttggtaatcaaggtcaccgccaccgctcctccaagcgggaaagaaccttctgtcgtcatatctggaaaatctagaattcggaacgtcataaagattcctaaccctaaaatggcccaaatcaaaccttgtgaaacaattgaattaatcatagtttctcccttcgataatagtagtttaattgtaacataaatagggaggagaacctataggaaattgatgcttctcattgcatttatttttttacttttgcgctttgttcaattttatatcgaaaaaacgaatcaaattatctttgcggttcatttttttgtaaatatttttttggatataaatatcaatatttaaaaactcacatttaaagctattttctggcacttttatgaaaacatcaaattcactttctttccaaaattgacactatctagtgaaaaatcgtatacttatttggtataaaatgaacaaataatacagaaacgttgatttacttatttagactgtatgtgggagaaaaaaatgaaacaacaaaaaaatagtgtctctgaaaaagggcacggctatttccgcaaacgcaacaaggcattggtctctatgattaccctttttggagccttgatggtaagctctgttgccatggctgacgaggtcaacaccagtccgacttctgaaatcacagcaaccgctcaaccagtagcaaccaataccagtactcctaccactactagtgaggaaggtgctacgacggaagcgacttcttcgccatcggaaacaacaccaactgtaactgccactcaaccggtcagtgcaactccagcaactacttataatactccaaaaatcaccaacgacgtcacctttgataaagcgacttataaaagtggggaagacgttcggatctccatcaacaaccctgaagtggtttcttctgatgtcactgtctctcatttagatcaggtcatttatgaaaagaaaaacgttgaaggtagcgagctgacgattccaagtacggtcttttcacctaatgctggatttatcgtagatgtccttggtaagaaagcagatggctcccaagcctttcataaggcagcgggtcttgctgttgaagatgactggacgatctacccacgttatggggtggttgccggctcaaaagacaatcacaactccatcaccaatgatcaggtagaaggttacaaaaatagtattgaccaattggccaatatgcacatcaacaactatttcttctatgatgtctataatacgcctgccaacccattcccaacaaatgttgaacgtttcactcaagattgggcgactttcttgattccaaataacgaaacagatcctgacaagcgcaagtcctacttacctgtcatcgatacagaagcagtcaaagagctagtggctcatgtccatacaactggtgccaaagccatgctgtataacatgatttacgcggtttccctcgaagaaggggtcccaaatgaagtgaaaagtgccattgttcgcaatctacaagaccatttcaactttggtaaaaagggtgatgtcacagcgaccgatatccaacaatttcttgatccaggcgatccaaattggcaaaaatttatcattgaagtcatgaccaaagccatgaaagaagggaattttgatggatggcaaggggatactatgggctctaactgggtggaaaaagtcagtgaacctggaaaaggcttctctttgagcgaacactatccagaactagctgcagctacaacagaggccctcaaaaaagaaggctatgactttatgatcaatgatatctccactggagatgctgatcgactaggtaagaccaatgtttctgcaccttatgcggaagtttggggagatagcattgcctatgactctacctaccaagccttgacgcgccttaccgaacggatgcgtgatttatacaaggggaaatctcctatcatcgcagcctatacccatcgtggtaaaaatgcatcagccctcagcaaagacaacgaattgctgacagatgctattatcgcagcgagcggtggttaccatatgacaactgctgccctcaatacttctcaagatgctaaaggttttggggtgatccaagcagaatggtatctcaatcaaaacctaccagtcaatgctgactttgccaatacagaattcaactaccaagaattcatcgttgcttaccaagagcttctccgcgggcgcgaaaccttggcgcatgatactcgtcggattgtagacaataccaatgtactggtgaacggcaacttcatcggatccaacctggataatgctgatggagttcaacctggaaccgtttataccattacaaaagaaaccaagacgggtgatcggattgctcacttgatcaatttggtcggcatcactgaaaacaaatggaacagcgctgtgaatacaaccgaaaaattgaccaatattcaagcttttgttccactcggaaaaatcacaaaagaccaggctgaacacgccagcatttactgggcaacacccgatgctgttgaaggaaaatacaacatcaacctccgagaaacaagcgcaaatgtttattatgacggaggggctggccaatggatggctgctatcgatgttcctagtctagatgtatgggatatgctctacgtcaaactcaatgaagccgctcatgttctttatcaagacgaaaacggagttgagctcgagcgttccagtgacttggttggtcatacaggtgaaaagatcaactactctacaaaagaaaccattgccaactatttgaagaaaggctatgaactaatagagaatggcttcgatgcagacggacaaccaaactttgaccgcgacgctaccaacaccaatgaagatggcgttcaagagtttattgtccgcttggcaccaaaaattgtagaattttctgcaacacagcccatccaagccggtcaagttgttccaggagacagcgaaggtcgtgtctatccaactcctctagctccagctggtcaaacaacggctgatctggatcatttatctgaaacagtgacccgtacggtgacctatgtaacagaggaccaggatggatctaaccgccagcctgcaggaatagctgaccaaactgacagccttcatttcactcgcaaaggtaccatcaatttggtgacgggcgagacaagtcttgaagactggacagctcaagacggtacaagctttgcagctcttgaaaatcccgtcaaaaaaggctatgttgtcgtagcagaagaatcaacagatgccatcacttctgatctgacaaaagcaggagaacatactggcattcatgctgatgcagcagacatcacagatacggtcatctatcgcccagtcggggcttataggatcagctatgctactggtaaagaaccagctcatgctcaaaaagagatcccttatctaaatgatcccacaaatccaaccgccatcttgtctcccactgctatcctttcgtacgtggagggattagagccaaaagatgctcgtggacaagtcttaaaccttgtggatcctcttgacgaaacaaaaggctatcttcttccaagccctgagtctccaacagttgatactgctatttcctacactatcaccaaaggatcggtcagagtacaattcctcactgagggaggcgacactgatatgcaagaggcgcaagaccttgctacagaggtagatttcggcaccaagtacagcagtgaggccccaacagaaatcacaaaagatggtcgtatctaccatctagttggacaccgtgctgattctgctgatccaagtggcacagtcactaagggaatgaaaactgtcatctatgattacaagttagctacaggaacggtcatcgcgcgatttgtcatccaagatactaacactgaattgcaaccagagcttgctgttgcaacaaatgtggacaatggaacccattacgtcgctagcgcaccagatgaaatctccaacgacggccacatctatgaacggatcggtgcagctgaacaaactgggaacgtagaagtgggaacaaccatcttgatctttgcctacaaggtcaaagaaatccctactccacaaccatcccaagaaacagaaaatgaagaaacagtcagccctcttccttccgtgacaaaagcaaacacgactgatgctcatgaagaaaagggatcaccacttctctctaacaaagaagaggagaaacctcttggaacaacaagccaaaaagaggaactccctgaagttgttcctaacacccctcaagaaggaactcacctacctgcaacaggtgaagaaacctctcagctagccctacttggacttggccttttagcaggtttgtccagtcttatcccttacaaaaagaaacaagattagatcccaaacacaaagaaacttcctatggaattctgttccaaggaagtttttttatatttatacaactcattcagagtctagatcccttttatgagggtaactgacgacaataagggtgtgaagtactaccactccaaaccctactgtattccaattcaaagtggattcattccccttgttgccggcagtttgaaagatcaaattgcttcactagtatactgttttctccacttcaagtcaatggaaattatttgaaactagtaacagaatgaaatgactaatcgaataatttctgaaatatttcataatatatgcaattttttctaagcttttaacaacaaacaaagaggccttgctctttcgagcaaagcctcttcctgttggatctaaaattgtcacctcatcaacaagtttgtcgatgtcacctcaattttagtcttcgcgttttttgcgttttgcaagtcccgcaaggccaaccataccaagtgcagcacctaacaatgcagcagatgctgattgttcttcaccagtttcaggaagtgctggagctggaggagttgtaggtgttggtggtgttggtggcgttggtggtgttggcggtgttgttggtggtgtattcggtggtgttgtcggcggtgttgttggtggtgtattcggtggtgttgttggcggtgttgttggcggaataacagtgttgttaaactctgtatcttctggcaacttagtagtagctactaataccttacctgctttattcaccacgataccaacagtagcaaccatcttatcgtaaacaacgctagaatctgtgccacggatttcttctacatggtagagatgagttccttcttcaccacgtttgaattcaagatttgagaaggtgatcttaccagccgcatcattggttacggtttcgatcacatttcctttttcgtccttaagaacgaagctgaattcaccagccttcaatgcacgaccttccaatttcttagtgaattggaattgaaccttaactggaatgttgactacacgtttttcagttggtttttctggtttttctacagtcttcttagttggatcgtattggtgtacgatttgtgaagctgtattttcaatgtccacaccatcttgagcagattgtttaatttctgcaggaatttcaaacttgtagtaacgtccaaaggccaacttagttgtgtcgatgacttgtgtattttctgcgtctccaagtgacttagtcaagtctgatttagaagttgcagtaatcacaccgttttcaaccttgatatcaaacttagctgttacatcttctcctgttacagagtcgtatgccttaatatcagctccgttgacagtcaagttcgcactatcatatttatctgtaacaccaacagattgaatattgtgtgcttcagtgaatttagttgtatccaaccatacttggtagtatactttatcacctttcttaagtgtcttcgtattgatattttgagcttcgttgttggcagtaccatccgcatatgggttcgcatttgtatctgcgtacttgtctgccaactctttatcgtcatcaacgagcttgtcgcctgtgatatcgaatttctcttcagaaacaacatatttctctggttggaatttaggttcttctggaggagtcacacggttgttaaattctttatccgcaatgtcgcctacagtcgcgataagaactttagcagtaccatcgtgtttcactgtaactgttacattcgctttcattgtgtcgtatgtaacggttgcgtcgcttcctttaacttcttctactgtgtagttgtgaacgccttcttgacctttcttgaattcaagtttagagaacttaacgttacctgaggcatcgttcttaacagtttcaagagtcttaccttctgaatctttaagcacgaagctgaattcgttagctttaagctcacggccttccatacgtttagtgaagttgaattctacttcaactggaacgttgtttacacgtttttcagttggtttgcttggtttttcaaccttcttagttgttgggttgtagtagtttacaacttgagccgcagtattttcaatatccacaccaccaggtacatcagctttcactgttgttgggatgtcgaacttgtagtaacggccgaattcgaatttagttgtgtcaataacttgtgtgttttctgcgtcgccaagtgacttagtgaagccatctttaagggttgcagtaatcacaccgttgttcacagcgatatcgaatttatctgttacttctgcgcctgttactgaatcgtaagctttgatcttagtagaatcaagttccaacttagtttcatcgtagtcatctgagattcctactgattggatgttgtccttgttagctaagtcgaatttagttgtatccaaccatacttggtaaaccaacttgtcgccacgttttacagtcttagtattcaagttttgagcttcgttgtttgatgcattgtccgcatatgggttcgcatttgtatctgcgtacttgtctgccaactctttatcgtcatcaacgagcttgtcgcctgtgatatcgaatttctcttcagaaacaacatatttctctggttggaatttaggttcttctggaggagtcacacggttgttaaattctttatccgcaatgtcgcctacagtcgcgataagaactttagcagtaccatcgtgtttcactgtaactgttacattcgctttcatggtgtcgtatgtaacggttgcgtcgcttcctttaacttcttctacagtgtagttgtgaacaccttcttgacctttcttgaattcaagtttagagaacttaacgttacctgaggcatcgttcttaacagtttcaagagtcttaccttctgaatctttaagcacgaagctgaattcgttagctttaagctcacggccttccatacgtttagtgaagttgaattctacttcaactggaacgttgtttacacgtttttcagttggtttgcttggtttttcaaccttcttagttgttgggttgtagtagtttacaacttgagccgcagtattttcaatatccacaccaccaggtacatcagctttcactgttgttgggatgtcgaacttgtagtaacggccgaattcgaatttagttgtgtcaataacttgtgtgttttctgcgtcgccaagtgacttagtgaagccatctttaagggttgcagtaatcacaccattgttcacagcgatatcgaatttatctgttacttctgcgcctgttactgaatcgtaagccttgatcttagtagaatcaagttccaacttagtttcatcgtagtcatctgagattcctactgattggatgttgtccttgttagctaagtcgaatttagttgtatccaaccatacttggtaaaccaacttgtcgccacgtttcacagtcttagtattcaagttttctttttcgttgtttgatgcatcgtccgcatatgggtccgcattggtatctgcgtacttgtctgccaactctttgtcatcatcaacgagcttgtcgcctgtgatatcgtatttctcttcagaaacaacgtatttctctggttggaacttaggttcttctggaggacgaactgtgttattgaattctttatcagctggttctgtcacgtttgtgatcaaggctttggctgtaccatcatgacgaacttcaactgttacaacagctttcattgtgtcataagttacggttgcgtcagttcctttaacctcttctactgtgtacttgtaagtaccctcttgacccttcttgtatttaagggcagtaacagtttcaccagctttattagtgtaatctactggagcaaacttgatcttaccagctgcatcgttggttgcagtcgcaatcacaacattgtcactgtctttcaactcgaatgtaaattcgccagctttcagatcacggccttccaatttcttagtgaagttgaattctactgagattggaacactgttaacacgtttttcagttggtttgtttggtttttcaactgtcttgcttactgggttgtagtagttaacaacttgtgctgccttgttttcgatatctgcaccagctacaacatcgtctttcactgttgctgggatatcaaatttatagtagcgtccaaattcgaacttagtagtatcaatgatttgagtattttcagcgtcgccaagtgacttcgtgaagccatctttcaggttcgctgtcagaacaccattgttatcagagatatcgaatttcgtcgtaacatctgcaccagtaactgaatcataaaccttgatatctgaagcattaacagtcaatttatccttgtcgtagttatctgtgattcctactgtttggatattttctttgttagttgctgagaatttagttgtatccaaccatacttggtagtaaagtttttggccacgttcaactggtttcgtgttcaagttttcatcttcgttgttggcagttgtatcgacatatgggtttgtatttgtttcaccatatttatctgtcaattcagaatcgtcatcaacgagcttagtacctgtaatatcgaatttcgctttagaaacaacgtatttctctggttggaacttaggttcttccggaggagttaccttgttgttgaattctttatcggcaggatctgtcacgtttgtgatcaaggctttcgcagtaccatcatgacttactttaacagtgacaactgcagccatttcatcgtaagtgacagttgagtctgtacccttaacctctgttacagtgtaagtgtaagtaccttcttgacccttctggtatttaagggcagtgacagttttaccagctttgtttgtgtagtcaactggagtgaacttgaagttaccgcttgcgtcgtttgttgcagtcgcaatcacaacattgtcgctgtctttcaactcgaatgtaaattcgccagctttaaggtcgcgaccttccaatttcttagtgaagttgaattcaactgagattggaacactgtttacacgtttttcagttggtttttcaggtttttcaactttcttagtcgttgggttgtaatagtttacaacttgagcagcagtattttcgatatctgcaccagctaccacatcgtctttcactgttgttggaatatcgaacttgtagtaacgtccaaatgcgaatttagttgtgtcgatgacttgtgtgttttctgcatcgccaagtgacttcgtgaagccagctttcaagttagcagtgatcacaccgttgttcacagtaatatcgaatttatctgttacttctgcgcctgttacggagtcataggctttgatgtcagctttattaagatttaatttagcttcatcatagttatctgagataccaactgtttggatgttgtccttgttagctgcatcaaatttagttgtatccaaccatacttggtaaaccaatttagaaccacgttcaacagtcttggtattcaagttttctgcttcgttgtttgatgcatcgtccgcatatgggttcgcatttgtatctgcgtacttgtctgccaactctctatcatcgtcaacgagcttgtcaccagtgatatcgtatttttctttagaaacaacgtatttctctggttggaacttaggttctgttggtggtgttaccacgttgttgaactctttatcagcgatatcgccaagtgtagctactaaagctttagctgtacctttgtgtgaaactgtgatagttacagttgctttcattgtgtcgtatgtcacagtagcatctgttcctgcaacttcttcaacagtgtagttgtgaacgccttcttcacccttcttgaatgtaagagctgagaacttcacattaccatctttatcgttgcttacagtttcaacttctttaccatttgaatctttcaatacaaagctaaattcgttctctttcaattcacgtccttctagacgtttagtgaagttgaattcaattgaaattggtactgagtttacacgtttttcagttggtttgcttggtttttcaacagtcttgcttactgggttgtagtagttgactacttgagccgcagtattttcgatgtctactccacctgcaacgtctgctttaacagttgctgggatatcaaatttgtagtaacgttcaaatgcaaattttgttgtgtcaatgatttgagtattttctgcatcacccaatgacttcgtgaagccagctttaagtgttgcagtcatcgcaccattttcaactttaatgtcgaatttgtttgttacatcgtcaccagttactgagtcgtaagctttgattgctgaagcatctacgtcaaccttcgtttcatcaaagtcatcggtgactcctactgattgaacgttttctttgttagttgctgagaatttagttgtatccaaccatacttgatagtagatcttatctccgcggttaacagtcttggtattgatgtttgctgcttcgttgtttgaagttccatcaacatatggatcagtatttgtttcaccatatttatcagtcaattcagaatcatcatcaagaagtttgttatcagtgattgagtatttcgcttcattcaatacatacttctctggttggaacttaggttctgttggaggagttactgtattgttgaactctttgtcagctggttcagttacgttagcgatcaatgctttcgctgtaccgtcgtgtgatactgttacagttacttctgccttcatagtatcgtaagtgacagttgcgtctgtacctttcacctctgttacagagtaagtgtaagtaccttcttgacccttcttgtatttaagggcagtgactttttcaccagctttatttgtgtactctactggagagaatttaatcttaccatctgcatcgttggttgcagtcgcaatcacaacattgtcgctgtctttcaacgcgaatgtaaattcgccagctgttagctcacgaccttccaaacgttttgtgaagttgaattctgcagtgattggtacactgttcacacgtttttgagttggtttttctggagtttctacagatttgcttactgggttgtaaacgtgaacgatttggttggctttgttttcgatgtctaccccacctgcaacgtctgctttaacagtcgctgggatatcgaatttatagtagcgaccaaatgcaaatttagttgtgtcaataacttgagtgttatcagcatcacctaaagatttgttcattgatgctttagatgtagctgtaatgactccgttagctactgtaatatcaaatttggatgttacatcaactcctgttacgctatcgtatgctttaatatcagcagcgttaacagttaatttatctgcatcgtatgtatcagagatacctacagattggatgttgttcttgtcagtgaagttcttagtatccaaccatacttggtagaccaatttttcaccgcgttcaacagtcttggtattgatgttttctgcttcgttgttagtagttttatcagcatatgggtttgcatttgtatctgcatactcatctgtcaattcatcatcgtcgtcaacgagttttgtaccagtgatgtcaaatttttctttgttcagaacgaatttttctggttggaactcaggagtctctggaggagtgatcttgttgttgaactctttatctgctgttccatcagtagcgttaccgttggcatctaccccacctgttgatgatacgttggttacagttgtaagagcatgaccgttcttagcaacttcaacagtgattgttgctttcatcgcgtcatacgtcatacctacttctttggttgcagggattacttcttctacagtataagtatgagtacctactttagtgttgtcaaatgaaatttctgtaaaggttacagttccatcttttttgttggcaaccgtttcaacttcttgaccgtttgcatctttaaggatgaacttgaactcaccatctttaagctcacgtccagccaatttcttagtgaagtcaaatttcactttaacaggagctacaacgtagttgttgaagactttatcatccgcgcttgaggcaaatccaccagtaccgctatatttaactgaagcttctaagtcaccagcagcatttttcgtaacctttacagtcatggttacttccatagcatcatagtcgacatccttatctctgccagctaattcagtgatagtgtatgtataagtaccttcttttgtgaatgacaattctgagaaggttgccttaccatctttatttgtgacagtttcttccacaccaggtgaagatgagttttccttaatcttaaagctgaattcaccatctacaagagcacggcctgccaattgtttttcaacttctggagttactgttacaggttcttgttttacatagtagtaaacagttggtttatatggtgttaacgagtttaataagtcaacgtttgtaccaatctgtacatatgcaccattttctaattgactattaggtgaaaggtgtccaataccgtctcctaagaatggtacgaatactgttttcttaggtgtatatccagcagcagtttggaagtcaaatggaacttctactccattaggatggtttacacctttattatcagtgaaagcaattgtgttaagaggtgatttcttaactactaaatcttgtgtattgtattcacctggtttaatcggcttggtttctgccaacaacatgtaaccatcagtgctcaaggtaccatcagaacgtttgctttgttgttttggatctagtaagtaaacacgaactactactgatccatcttcacctacgatttctttaatccgtttgattcctgcacgctcagcgtccatgaatttagtaccaactacgtaaggacgacttacaaagccagttgtcgaatctggatttgctgtttggtaaagtttgtatccatcaaattgacgctcaccagacgctgtgaaatgttgtccttccatagctttagttgcatatttagctaaatctacttctttaccatttggtacgtagtcttgaacagttttatctgttttattagcgttaaatgtagcattatttttatcgactactctatagtaagtcggtttttcgacaaattttggaattttagcgtttgaatcagtaattgtacgaccgttataagctggttccacaacgttaataatatcagttgatgtacgagcattataaacatctgtatataatttttgttcagcttcattttttggatttactaaagcttgaatacttgccccaacttcataaccaaattgaatgaatggttcgtcagttttaccaggtcctgctcctaaacctttgttgtaatcatatttcacagttaattgaccattagaggcagcagttgtagttgtgaatttttgaataccgcttgacgcagaaagagttctagtttctactacattaccagtagttttatcgattaattcaacagttgtttctgtagaatcatcaaatcttttatacgcacgtgtataataatttgtattatatcgttcattaaagcgagtaaggtctatgatactgtaagtataccaatctccttcttttcttgcgtacccagctggtacaggttgagaactaacagttgctccattaggatttgtaatggttggatctactgtttcaccatcttttaagtaagtgcttacgcttactgggttagtattgtgatctgcagaaactgcttcattagtaacagcacgacggctacgacgacggctgcttattgctaatgctcctgcatttgtacgttctgcattagcatttgctacagccacagttgcatctgcatctgtacttgctgaactttctgcttgcgtaccagtgatcggagctgctgaacttacagtagctgaaaaagtagtcgttcctgctggtgcaactgcttcttctcttgcagctgctctttctgagctttcacctgctgcagcaggagttgcagtagattgagctgtggtagccactgttgtagaagctggtttagagcttgactcttttttcttctctacaggtttgctggtttctgatgacgctgtcgtttttggagcttcttcagattttttagtttcagctttagctggttttgctgcttcttcggttttagcttccttgctttctgtagcatctgatttctcagctacttcagatttttcagtcgctgaagctggtgcttctggagttgcagcagaattagaacggtctacttttggtgcaggtgctccctcaccatagactggggaagcaccaggtgcttctgtttgacttgattctgttgcagcaggttgcgtttctgaagctgctgtttctgcaggtccagaggctgcttttgcttcatccgctgacgcagattgagcacctgcagcaaagagcgctgttcctaagagaacagaacaaaccccaatgctatattttcgtaaagaaaagcgttggcgtctattgaaaatatccttcatttataggatctcctttttcatatttcatgattccatgatacaaataaaattgtaacattcttgacatcaagagtcaatctgttgaaatttaattgtaatattcttgttaaaatgttatattataccacatattttttaataatttgtgctaaattgtcacattttttcctatccggttcactttttttataccaaaaaagaagaatacgggaaaacagagattattctgtcttcctatactcttctctatgcttatttcacttctgaaatcaaaccagtatccacatcatacacagctcctgaaatcaccacatcctctggaatcaaaggagaagcttttaaaagctccatatcttcacggacgctttcttcaacatcttgaaagggtaggaaatcactatctcccacatccactcccagttctttcttgagatgctgacggaaaccctcgttttcaaaggtctgtgcgccacagtctgtatggtgcaaaaccacaatttcacgggtacccatctgctgctgggagatgaccaaggagcgaatcatatcatcagtcacgcgccctccagcattccgcaaaatatgggcatctccaagagccagacccagtgctggtgccacgtgaaggcgggaatccatacaggtcacaatggctacttgtgttttgggcttaatcggaagacggaggtctccatgtagcgccacataagcttggttagctgttaaaaaattatcaaaataagacatggtctctcctttattcctttgaaattcaaatcatctattattttaccacaactcactatttctgtcaggggatacctcctgtcatctgtcacatctgaaaaaagggagtgggaaagaactccaactaattaaaaagagttcgtcttcccacccccgcacagttgattaggtcatctttggagattgaaaagcgaacaaagatgccaatcaaccactgcgtcatgctgttattactatcaaacatcaaagactggacagtttttgcccagcctcttttctactattaaaatactttcttcaagacttcagacagtgtactcacaccgaccacttcgatccctgatggtgtcgaaatccccgtcagagagtttttcggaacataaatcttggtaaaaccgagcttggcagcttcattgatccgttgttcgatccggttgacccggcggacttctcctgtcaagcctagctctccgacaaaacattcctgcgggttggtcggcttgtccttgtagctggaggcaatggctacggctacggctaggtcgatagctggctcatccaatttgacgccaccagctgacttgaggtaggcatcctgattttgaaggagcaaacccgctcgtttttctaacaccgccatgataagactagcccgattgaaatcaagtcccgttgtcgtccgcttggcgttaccaaacatggtcggtgtcaccaaggcctgcacctccgccaaaatcggacgcgtcccttccatggtgaccacgatggacgatccagttgccccatccaagcgttcttccagaaagacctgactcggattgaggacctcaaccagtccacctgattgcatctcgaagatcccgatctcattggtcgagccaaaacggtttttgaccgctctcaggatccggaaggtatgatggcgttccccctcaaagtagagcaccgtatccaccatgtgttccagcatccgaggtcctgccaaggttccttccttagttacatgccccacaataaagatagcaatgttattggtcttggccagctgcataagctcagctgtcacctctcgtacctgagatactgacccctgcatccctgaaatttcaggagacataatcgtctgaatggagtcaatgatcagaaagtcaggttggatgcgctctacttctgctcgcacactctgcatattggtctcggcatagagataaaactcactgtcgatatcccccaagcgctctgctcgaagtttgatctgctgggctgattcctctccactaacatagagaaccgttcccacttgagatagctgggtcgacacttgaaggagaagggtcgatttcccaatcccaggatccccaccgatgaggacgagacttcctgggacgacaccgcctccaaggacgcggttgaattcctccatctcggtcttagtacgatggacattaatagaagttacttcagccaatttcataggcttagttttctcacctgtcaaggacacccgggcattcttaacttctgcaacttcgacttcctccacaaaagaagaccaagaaccacagttaggacagcgccctaggtatttgggtgaattgtaggcacaattttgacaaataaatgtcgtttttttcttagcgatgataaacctctttctaaatctctatctcacactcaatcacttggcaaaaatcaatggtttcattcggtacaaattgacgaatgagcatgcgatgggctacaactaccacagtttgatgttcccgatacttagccatgcattctagaaaacgagacttcatctctacagctgtctcatattgaacaggagaatttgggagcaactcccccttgttttctaaaaacagacatctagctgtctcaaagttctctatacctgtttcataaacctgccattcgtgcaataaaggctctaccctcaaaggaaggcccgtagcacaagccagataagaagctgtttctaaagctcgcgtcactgctgaagctactagcagatcagctgattggaacaaggggttttggcaaaggtcctgagcctgtttccttcccttctcagataagggcgccaagtctatcccaaatcccgtataagaacgctcctctaactcacggtaatctggctctccatgacggataaaaataattttcatattaagatccccataaaactattaattctccttggtagctgacaaaacggaagccttaacacagcctttgccatctacccctataaactctatgcttttagcaccgttttcctctaaaaaatcttttaaatctggattagtaaagcaagaagcccgacgcttctcaaagatacgagaagatacaagcagcaagccggtcgcaaatttcttctttctgtcttttctcccccgtcaaggacacacgcgcattcttgacctctgcaacctcaacctcctcaacaaaagaagaccaagacccacagtttggacagcgccctaaatacttgggggaattatattcacaattttgacacacaaatgtcgcctttttctttgcgataataaagctctttctacatctctatctcacattcaatcacttggcaaaaatcaatcttctcgtctggtacaaattggcgcatgagcattccgtgagttacaatgataatagttttataatctttatatttttccaaagctcttaaaaaacgatgacgcatctctagatcagtttcatagcgataaggagaatcttcagataaaactccttgatgttttagataatattcatgagctaccaatacactagttaaatcagagttagtaccatctaagtctggacgccactcatgaaaaaacggctccacaaataagtccaatcctgtttcaactgctatataatgtgctgtttctaaagccctcgtcacagacgatgaaataataatctctgcctttccaaaacatgcagttttagcaacttcttttgccagactgcgacctttttctgtcaatggtgctaaatcacgaccaaaaccactatagagtcgcggattttcaagtttatcaagcatactataatctggctccccatgacggacaaagataatcttcatcctagtgccctgtgcttccaaatccaccagtacgaactccgtctgcttcatctccatctacgattaaaaatggtgcaaagacagcctgaaccacacgttcgccgacttcaagaacaacttcctgatcggtaatatttttcatctgagcaaagatatggccttcatttcctggattaccatagtagtcgccatcaataacccctacagagttgatcaagaccaggccttttttgcgagggttagaggaacggtcatagagatagagcacctcccccgcttgcatataggccttgaccccagttgggacgaggacgatttctcctggtgcaatcactgtgcgctcggctaccttcaaatcatagccagccgcatgggccgtctcccgttttggaagcaagtcctgattggtatagcttgatacaagttcaaatccacgaatttttgtcatcatgattcctctttcattctaaatagtttctatctcttctattataccatcactttgccctagcgtctctcctatactactattcgtatttttttagtttttttggaaaattattgacagtttcgtgtatgctttctgaaaattatagtaagtaaatgaaaatatattttattatatgatttatgccaaaaatcgccctttaaagcttgaagctactcatcatttttgctataattccctttgtagggaataattttaaaactaaaatatttttcttactaaaacaaatatatggaggtctttctcaagattcaatttggaaacttgagatcttacggagcggatacagatctcgaccagtttgaccatattgtatagtgggaataggattttatgaaaaaaggggtagataaaatggataagaaaaaaatgtcaaaatttttgcatttatccttgctttattaacggttctcttcactcttagcctgaccaaaacatcagccgagacacccggagtaaccgttactggtaaattcgtggatacgatttcaaatatcaaagtatccaacaatgaaggaggagatctcaactgggacttacaacagtgggcaaccttccgaatcaacgctgattttgatttgtctggaaaaaatgttaaagcaggagattcaactgtagttactgttccagatgctttgatgattacttcaagttcgtttccaattagagatttaaatacaaatgaagttatcgcaaatgctaaagtaaacccagataataaatccattacaattacctatacggattatgttgaaaaacactccgatacaagcggatcattcttcttttacgctcgtatcgatttcaaaaaacaccctcaaaaaggtgaggttccagtagaaatcaccattaacaacgaaacaaaatttgctggtaaagtttcatttactggtgtcggcgacggaaatccaagacttttaacaaagactagttgggtaaacgcaggggaccaaagggaaattcaatacacgatttctgtcaatcgtacaaagcaaaatattaagaatgccacactcgaagatcacttacaatttacgaatgcttcatacgtaaaagatagcattaaaattattaaaggtaaattctcttttgatgctggtgaatgggtattctctgatagagttgatgtaacagaccaacataagattacaattagcgaagatggtcgatcatttgttatcgatttaggtgatgttactgaaaatgaccaatatcgtattgcttataatgttcgtttaaattatgaccctgccgacggagaggttttgagaaatgaagcaactcttaaaggtataggtattgaaaccaaaaatataacgaatgctgcagccgttcaaattcctggtggtgctggtcttggttatgtttactcaatcaatatccataaagtagacgatgcaaatcaacctcttaaaggtgctaagtttagagttgttcgtcaagctaataatcaagtcattggtgagtttgaatcagatgaaaatggtaatattgctgttggcaaactgttaaaagataaatatatcttaactgaaattgaagccccttcaggtcatatcatcaaagaagccgatactgtggttaatgttgaagattttggagcagatcattcggtaaccaaaacaattattaatccgaaagataagccaaaagaaacaaaagctaccatcgaacttgataaagctcttaccggtcgtgatctaaaagacggtgagtttagctttgaattgtacgagggtgcaactaagcttcaaactgttaccaataaaaacggcaaggtcacatttgatccgatttcttataaggaagcaggagaacacacttacactgtaaaagaagttgttggaaatacaccaggtatcacctatgatacaactgaaaaacaagtgaccgtgaaggttacacaagacgggcaagctctaaaagctgatcttgtctatccagagaataaaacatttaacaacacttatacggctcctcaaccagcaaaagctaaaatttcagctagcaagattttagaaggtgctgaattgaagaatggcgaattcaatttccaattgttggatgaaaccggaaaagttcttcaaacaaaacaaaatgctgcagatggtacggtaacctttgatgacatttcatattcatcagaggacgcaggaaaaaccttccactacacgattaaagaagttattcctgaaagcaaagcaaaaggaatgacctacgatgaaggaagtattgatgctactgtaactgtcacaaaagatgatgcaagcaatacactcaaagcttctgtggcatatggtgataagaaatcattcactaacaaattggtaacaacttcaattccaccaactccaccgactgttgacaaacctgaattgaaactgtacaacattcaattgcacaaagctaacgctgacggaaatgctcttgcaggtgctgtatttggtctatttgaatccgatggtactactcctgtagcaaatccttatggtgcaggtcaagcgactgcaacttctgatgcaaatggtcttgtaacatttacaggattagaagcaaaagattatgtagtgaaagaattgactgctccagaaggttatcaactatcagcagatgtgattaaagtttctgctagcgagttgaaagctgcgactaacctcgtcgtagacaaaggaacagtggtcaacaaaccattcacttcaattccgccaactcctccaactgttgataaacctgaattgaaactttacagcattcaattgcataaagtcaacaatgaagggaaaccacttgttggagctgtctttggactctttgaggcagatggtacaactccagttgccaacccatatggagaaggtcaagcgactgcgacttcagatgcgaatggtcttgtaacatttacaggattagaagcaaaagattatgtagtgagagagcttacagctccagacggttaccaattatcagatgaagtcatcaagatcgcagctagtgatttggttgcttcaaacagtgtagtagataaaggaaatgtcgttaacaaaccgttcacttcaattcccccaactcctccgactgttgacaaacccgagttaaaactttacaacatccaattgcataaagtgaatctagtaggtcaagaccttgcaggtgctgtatttggtctctatgaggcagatggtgtgacaccagttgccaacccatatggcgaaggccaagcgactgctacatccgataccaatggtcttgtttccttcactggattggaagcaagagattatgttattaaggagttgacagcgccagctggctaccaattattaacggatgttattactgtatctgctagcgaattaaaagctgcacctaaccttgtagtagacaaggggacagttataaactatctaacaccaccaaacacaccaccaaacacaccaccaactccgcctactacaccaccaactccgcctactacaccgtcaacagacaaaccaaaaggagataaaccttctggaagtcaaccaaaagaagataagaaacatacccttccttctacaggtgaaacagtaagtgctggacttgttgcagcaggacttgcgcttgcaggagctggaagcatgctcgttgccaaaaaacgcgacgaataattctaaaacaggttttcatctagcattgctagatggacctgtttttttattgatgaccgtcctgttttctgatcttatttccagtatttttgcgtcctttctaagacacaaaaaagagatcggctcaagtccaacctctaatttcattataattcctgtaataaataacggaagagttctaaattccctttttcttcattgaccaagtattctggatgccattgcaagcccataatgcgatgaccatctacagcttcaatggcttcgatggtgtgatcgcgcggatcaaaggcggtcgcacggaaattcggtgcgagatccttgatactttgacggtgcacggaattaatccgactggcctgaccaaagagttgttccaccacactgccttttttagtctggatagaatgggaagtcccaaacggaagtccttgccaatgcccttcgatctcttggttgagtgttcctccaaaagccacattgatcaactgaaccccacggcagattcctagaaccggtttgttttggcgtactgcttccttcagtagggcaagctcaaattggtcccgttcgatattgtaatcatcactttcgatggttttttcttcgccatagagacgaggatcgacattttggcctccacttaagatcaatttgtcaatcgtttcaacatagtccttaactaaggaaggatcccccatcgggatgaccattggaagtccacctgcttgacgaatcccttccgcaaactgactagatacagaggaatgaaggtttttcccttccgggtccaccggacagagattagcggatactccaacaattgttctgcacatattcattcctccttcatttttactaatacttatgttaccacccattagtgatagtgtctaatatgtattttttaaaaccgtgatagattttatttatcaccctcaccttcctcacaaaacaattgatgatcatacaagtttttttacctatattatgttaaaataaagaggaaaatagaatcgtccttcaaggcacacattcggccgtttcgaaggcgcaagcgctagatttctagccttgttgaaaaaatagacatagaaatggaagatacaatggaaaaacaaaccgttgcagtattgggtcctggttcatggggaacagccctttcacaagtcctcaatgataacggccatgaagtccgtctctggggaaatatccaagaacaaatcgatgaaatcaataccgctcataccaatcaacgctatttcaaagacatcgttattagcgaagagattactgctacgaccgatctgaaagcagctttggacggcgtggatgctatcctttttgtcgttcctacaaaggtgacccgcttggtcgctaaacaagtcgctaaaacactggatcaccctgtaacagtcatgcacgcttccaagggactagaacctggtacacacgatcggatttctcaaatcctcgaagaagaaatccctgcttctcttcgcagtgaagtagtagtcgtttctggaccgagtcatgcagaggagaccatcgtacgggacatcaccctcattacggcagcctcaaaagatttagaagctgcacgctatgttcaagaactctttagtaatcactacttccgcctctataccaatacagatgttatcggagtggaaactgctggagccttgaagaatatcatcgcagtcggagctggggccctgcacggtcttggttatggtgacaatgccaaagcagccattatcacacgcggtctcgctgaaatcacgcgccttggcgttaagctcggagctagcccattgacctatagcggtttgtctggggtcggtgacttgatcgttaccggaacttctgttcactctcgcaactggcgagctggtgatgctctcggacgtggcgaaaaattggaagatatcgaagccaacatgggcatgatcattgaagggatctctacgaccaaagtcgcccacgagctggcccaagaactggatgtctacatgccgattacacaagccatttaccaagtcatctatgaaggaaaagatatccgtgaagccatccaccacatgatgagcaatgaatttaaagaagaaaatgagtggaaataagtcaaccaccctatcatcaatcctaccttttagaaaggaaactatatgactaaagttagaaaagcagtcattcctgcggctggtttggggacacgcttcctcccagctaccaaagctttggcaaaggaaatgttgccaatcgttgacaaacctacgatccaattcatcgtagaagaggctctgaaatctgggatcgaggaaatccttgtcgtaacagggaaggccaaacgttcgatcgaagaccatttcgattctaacttcgaattggaatacaatctcgagcaaaaaggcaagactgacttactcaagttggtcaatgatacaacagcgatcaatcttcatttcatccgccaaagtcaccctcgaggtttaggggacgctgttcttcaagccaaagcctttgttggaaacgagccttttgtcgttatgttaggagatgatctcatggacatcactaatgatgatgccttgccattgaccaaacaattgatgaacgactacgatgaaacccatgcgtcaaccatcgctgtgatggaagtccctcacgaagaggtttcttcttacggtgtgatcgcacctcaaggcgaaggcattaacggtctttatagcgttgaaacgtttgtcgaaaaaccaaacccagaggacgctccaagtgatctcgctattatcggacgctacctcttgactcctgaaatctttgatattcttgcaaatcaagaaccaggtgctggcaatgaaattcaattgacagatgcgatcgacaccctcaataaaacccaacgagtctttgcccgtgaatttaaaggccaacgctacgatgtaggtgataaattcggcttcatgaaaacttcgattgactatgccttgaaacaccctcaagtcaaagatgatcttaaacaatatattatcgaccttggaaaaaaattagaagcaactgaacaaactgcagactaaaaaagaaggaagagagatttcattctcacttcctttttttgttgtatcttataaactgtatcgtttaatgggttctacgtttttcgatgtagtagccaaatccaaaaactgtcaaaagaactccgcctaccatcgtcgcgattgagatactttgtccggttgatggtaattttttctcacctttcttcacttcaatttttgctgcagatttataaactacaccataagtcgagaaatgagaggttgtaaatgttacggctgacttatcttcatttagttggaattggaaggattccaattgaccatcttcaccgataccataaactgcttctacttctttttgcccattgactggaatggtcacaaccgttgaactaatttgatgtacaggattattttggttcgataattgaatattatatgccttgtactctttaccagctagttctttaacatctttcaaaacttcgacaaggagactatagccaccttgagcaaaatcagggttttgcaagacgattcctgttgcctggtctactaaaatatacgaatttgttggtaaaactggacgaccaacggtactaacactgttactgtttgtaggaacaatagtagttgtactacttggtgttgtttcctccttgcttggttccgtatttgactcagtacttggtgttgtttcctccttgtttggttccgtacttgcctcagtgcttggtttcgtttcttccttgcttggcttggtacttgattcggtgcttggcttcgtttcttccttgcttggctcggtacttgattcagtgcttggcttcgtttcttccttgcttggttctgtacttgactcagtacttggtgttgtttcctccttgcttagttctgtacttgcttcagtgcttggtttcgtttcttccttgcttggcttggtacttgattcggtgcttggtgtcgtttcttccttgcttggttctgtacttacttcggtgcttggttgcgtttcttccttgcttggctctgtacttacttcggtgcttggttgcgtttcttccttgcttggttctgtacttgcttcagtgcttggcttcgtttcttccttgcttggttctgtacttgattctgtgcttggcttcgtttcttccttacttggctcggtgcttgactctgttggatccttgtagtcatctggtaaagatgcacggtatggatcatctgtacgacctgcttctttaagagttgcagataattcagactcatattgcttgaattgtttgaagagacgttcagaccgagctaaagcatcctcagtcactttatcttcaactgcttttgctgcagcttcatcagctttcaaggctgcatatttgctatcactaaccttctgttcaatgatcaattgttcttcgagagctttccagtgattttgaatcgattttccaaagaggtcttgattattgatggccatctggtcgatatgccatactgtccaataccatgaattcggatcataggtagcagtttgaggtttgaaagccttataggtatcttttacatttccatagaatggaacataaggagtgttccgagatggtcccataccaagccataaagtaccaccaaatgattttggaaggtttggattgatttggtagacatgggcatcgatgacgttttcgtttcctaaagcatacttgtattggtcttttcgaacagtatcgttgctaccatcatcaccttgtttcttaacaccaatttgatcgtctggaacaaaacgaccattcaaatgttcaaaacggttgcgttggagagcaaaggcatcttccaaagtaaatttcttgtttggatctgttggtgagcggaagagttcgtattcatcatcttcataagtcacttttgattttggatccaaaagagtgattcctgcgtaagtacgtgaacggtctccttcagcatatttttctggtccataagatttagcgatatggaagttaccatctttgtctgtcttgtagttaccagattctttggctactttttcgacatctttcgaagcgatcacattttccttgtcattcaaatccacatgaccaaggtagtaggtatttgcaaagactgcatatttgtcttctgggacttttaccgctacatattggtgaccagaaagaatttccatataccaagtttctttttggtctgcaaaaacgacaacattcccttctgctgatcctttttcttcaatgactttagctaggaattcaaccccttcacgagcagacttaacgcgtggtaaaaccacgtccaacatagcagcttctggaattcccttttctgtcaatgggtcagtcttcaaaacttttttgtttggaattgctgtaacagttgaggtcatagagacgccggcttcgttaaatccgtgttcaccaaaggcaccgttactaccatctccacgagcagagtcataagtcgctgtgtatttcatttcactggcagcatgtggataggtaaaaccattggattcgtcttccagttgatccccttccttataattcttcgcatcaacaaccacataattcttgttgtgcttgccaccatttggatagtaagggtagtcttctgtccgaccaaagagagtggtcccatccttggtcaattgacgaccaatgataaagccacaacaggcttgaactgcttgaactggtaggagcaaaaatgtcattgctaccaatgaaagtttaaacaaccatttcttcatggcaaatctccttttcgaatactccttttagtaaaaaaaggatagcattcccgattttttatacctccagtttacatcttttcatttatttttgcaaacgcttaccagacttgtttttattctatttttttctaaataatctttctatcaactcatttctatgtaaattatatatatttattgagatttcaaacaattttctgttagtttacgattttgctacattttttaggaaaaaaagagagtgggacagaaatcggtaattcgttagaattcgatttcgtcgtcccacctccgcacagttgagtagggctgtaaaagctgatgaaatcagcgtagtagattccactcaaccactgcgtcttgctcgacaatccaaaaacaattaagaggctaggacttttgtcctagcctcttcttaaaatagattcaagattttacctaaaaaataaagcaaaagcaagagataagatagggctgcactcatctgataggttcggttcataaagcgagcttcccctcttactggaaagacataagccaacatcaccccagctactaagccaccgatgtgccccgccatactgatccctggcatgaagctaaagatcaaattgaccacaatcaagctggtataggactgactcaagtgccgaatatagggactttggacaataaagcgcaaagcaccaatggtcccaaacagtccaaagagggctgtagaagctcctgccgcaatcacatctggcgtaaaaatagcaacaaaaacattgcccatcatgcctgataagagataaagagctaagaaagccttcgatccaaagagatcttctgccaaacgtcccaagtaatagagggtgatcatattgagcacaaaatgttctaggccgatatgaacaaatgtagctgtcactattcgccataactggctcggatcaactttcacaacctctccaataataccaccgctatagtaaatagcagcacctgtttggtagtcgcctccaaatcggataaacatggaaagaaagactgccgttgtcacgagcaacaagaggctagtcacaggataacgacgatcaaagaataacttcataaactagcacctcctgaactgcctgatcaaacgtatctggctggaactccttctgctggatggaataaatcgtactaaccgtttttccagcaaaatctgctaaataacgatcataatagccaccaccatagccaattcggtagccttttgactggaagaccacgcctggtacatggatcagatcaatctctgactgatccacaagctttcctttttcattgggctccagcaaaccaaagcgtgtcttttccaaaatgtcaggatcgtattccacaaattccatccgcccttgtggataggtacggggaacacagacgcgttttccaagttgaagagctgcttggatcaagccagctgtggagacttcatggtcaaaagacagataggtcgcaaggatctttgcctcctgaaaagctggtagctccaagaggcgttgagtcagctcttcatctgcttgagttttcacagtttgaggcagtgctttcatggctgctatagtttcttttcgtagtgttttcttcattccctactccttttgtctagcttttattgtaacattttttaggaaagatccgaatagtttttacgcaacaaagaaaaaatccaactccagacggagttgaatcattcctttattggttggctttcattttcaaaaatttaccaatgttttccacagcaaagggaagagctgcttcatttgggctcatcttaggatggtgcagggcataaggggtatcaattcccagccagaacatgaccccagggaccttgctcaagagaaagccgaagtcttctcctgtcatcgcaggcaggatatcaatcaggttcacatcttcctcagctgtgaaaaagtccatgagttctttggccaattctggttggttttccacaggcaggtaacctccttgcttgagttccaagtccaattttacatcaaaggctgctgcaactccttctgcaatggctttgacccgtttttgagtcaggaggttcatctccatggtcaaggtccgaatggtcccatgaaggaaggctgtctcagcaatcacattattggttgttcctgcatgcatggaaccaaaggtcaccacagcaccttcaatcggatcgacatttcgactcacgaccgattggacttgggtaatgaagtaagaggctgctacaagagcgtcattggcctcatgtggaaaggccgcatgccctccctttcctgtaaaggtgatcttgacttcacaggtccccgcaaaaagggtacccgtattggtcgcaatgtcccccaccttcaaatcagggcgtacatgcagaccataaaattcatcagggagccagtcgccaaaagcattgtccttatacatgagcatcccaccagcttcgttttcttcagcaggttggaagagaaagagcaggttattttttggttgtacttggaccagttgatccaaaagcccaagagctgtcgtcatgtgcatatcatgaccacaagcatgcatccgtccttcgtgcttggaggcaaaatcaaggcccgtttgttccacaatcggtaagccatcgatatctgtccgccagccgatagttttttcaggtgcagccccatggagataaaccagaatcccggtccgccaagtccgttgctcgacaaagtccttgcccgctgtgatctctgcgattcgctctaagaggtaggcttgggtttcaaattcttccaggccaatttcaggaatttgatgaagatctcgtctgattttgattaagtccaatgtcatagttgtcttctttctattagattagaatagaggccttacggcctctatatttcatatcttataaattacgcaaggcgtcttccaatgctgttttttgttgtgttttttcatcaatttccttgatgatacgagctggaacaccagctacaaccacattttcagggacatcttgagtaacgatcgccccagcggcaacgactgaaccgttccctacttgaaccccttcaatcacaactgcattggcaccgaccaagacattgtcaccaatccgaaccggctcagcagaagctggctcaatgacacccgcaagaacggcacctgcaccgatgtggctgtttttaccaactgttgcacggccaccaaggatagcccccatatcaatcatagttcctgcaccgatttcagcaccaatattgatgacagcacccatcatcacgacagcattgtcttcgatggtcacttggtcacggataatagcacctggttcgatacgcgcatttagatagcgcttatccagcaagggaacagctgaattacggccatcttgttcgaccacataatccttgttctctgtcaagttggcaagaaggggctcgatatctttccagtcaccgaacaacacattgccaagtttcgtaacagaagcaggaacagctgtggccaattccccttcaaaggttactttcacatttgttttcttctctgcatttccaataaaagcgataatttcttgagcagacattttttgtgcagtcatgagattctccattcatttcaattaaaggtatccatattataccacaatcctagtgagatgaacacctaaggcgacgtgcttgtagccgaatcctcaatgcctgtcatctcactgatggtgcgattgcttccaaagtgaataatgactgagtgcgaatcagacagtttatagtaaaaggttaagaaggactctgaactcatcatacttgaccaagaaacacggctaggaattccgactgtattcacaagatctgaatagctggttcctattttaatattggcaaaatcctctctgttcaaactgccatttttattggctaatcgctcactgtttaagttctcaaaattaagagaagatagacggttactaatcatatttgaaagcaaaacagatacagaagaaggggatccttcaacctcataatccaagcttgtcatgaaaggaccgacactaccctcttggtaggtttcttccccactactagccttgcccagtacagctaccacatcctgcggagacagataagttgaagaggtacgaccttgatccccctcacttaaaccaggaatcagggaaatcgccttctcataggtcacttgaaactgaaattcaccttccggtgcaatcaaggtactcgtaccactcttcaaggtttcctttctggttccataagaccggccagtacttccgtattcactagtagtagaagaaggagcttcctcactatggatacctcctgaagccagataggcaaataatcccagcatggccaataatccaaaaaaggctgccagcgaagaccctccactattagaggaaggagcatagttcttcgccctatccgattgggaatctagtaccgtttgccttggttctggatgcctgcttccccctattgaagccagatcggcttctgaaatcaagcggctcccaccctggtgctctacttttttctcagctgaaggagactgccctattgtatcttgtgctggtgtttctgaccttgtttcttctgttagtggtgtagcaagaacgacctgagctgattcgtcttcaggtgtagcaaatgagccttcctttggatcatacgattcctcctccacaccaatcgctggtttgtcttttcgttcctcttcttgtttcacctcttcctgaaaagcagggacttctagcacttctggctcttttgcgagcgtatcttctagcttctcaggacttcctttttctaagggtgcttctttcggctggcctttcgaaaaccgattctggtgctcatttcgtagatgcgaccagtctttatttcccattgtcctctccttttatttaaaatgcttcggctgatttttttactgtgctgtagatgtagaggaagctggtgtggtcgctacctctttcgatttgatatccttgatggtttgccggctatcaaaatggatttgaaccgtttgagaatccgataatcgataggtaaaggaaggcgcttccccgtaacctaaaagcccagatacatctatttcatctggaatccctaccgtattgagtaggtctaaataaggcattccgaccttgatagtggcaaaatcgtccttctcaagctcccattcttattcgcaaatcggtcactttttaagtgtttcaaacttaaaagagagatcctgtaaaaggcacctgttttttcaagaagaaccttcccatctgcatcctttgattggtaatctaatgtcagcaaaaagggactggaactgctatcactatacgttgcttccccactcctcgctttacctaatgctgcaacgacatcttgtgggtctaccgtcccaaaagaggtctttttttcttccactgcaaaattaggaatgagagacatggccttttcataggttggctgaaattgaaattcattagctgaggcgatgtaagaactattttcactggtcagatattccgttctgataccatcacgtgataaaccattgatcccctcactcgaagaagatgaagaagagcttttattaacttcgttttgaagcacaaacacaaaagccataaacaaggcgaaccacccaaaaaatcgcaaaagcgaaccaatcccctcttttgaggaagaaggggaagacgccattgtatctgaatggcttctagtatcctgatgattgtccatccctattgaagccaggtcagcttctgaaatcaagcggctcccaccctggtgagaggaagctgccttgatgtctgtccgttgatcgtccaatgatgtctcctttcttataccaacaccaatttcttggcttttttcttgaattccatcaccacttctggttgccctggtagctggtaagtcgcgcgatagcccattccgccatctggcatttccccccagaccaagcgttgaggatttcctagtttcttaatgagctgggcgaattctgtacctttgtgctctttttcagtagtgatttctttctcactgtttgtcttctcttttgcgtccaacaaattcgtcgcatccaccatcgtcaagcgatacccctggtctttttcctgttcaaaccacaaggttacacttttcttgccctgatcggtttgcttagccgcataggttaagacgagaaccgttttatccccttgggctgtcttagtgtagcgaactttttgagcttttccccattccgtcacaactgtttccaagcgggttcctggttgctgactctgcttgagacgaacttttaaattcgccacagcttcgatggtccatttaaactgtttgatttcttgttccttgctgaccaaattcttgtaatcctttggctggaaatgagtcagtgtttggtcctccttggtatcggttccttgctcttgcacctggatgcttgcaatcgcaagtaacactcctaaaacaaaacacaaaaacggcagcaagagttcttttcgattctttttcatccactcgatcatctgcttcaccccttcttcgtcaaacgatattgaccactctggtcacgttcaaaggttaaagagaccagtccatctgtcacctgataagacagggctaggacttgcttgtcctttgcagaggtcaaactaagagaattgggaagacctgattttttcaagacatcttctactgctgtccccttttccttttttccatctagcgtctgatagcctgtaaaatctgccagttttacgttctttttgctctgatagtgagccgattggggcgcaaagccttgaatcgagctcaaataaaaggtatcatcctgcttttgaaatcctatggtataaggatgaatcccctgcacaggagtcccatagcctagctggacttgcgctccaaaactcgtatcttcttgtgtaaaactcgctgcttttccaaattttttgacgaatgcagacaaagtcacccaatctttttgcgtctttccttcttcccttgcaaggtccaatgacaacaagtcttctaaagccggctctttggaagaagacgcaacaaattgctggctgtcttcttgcatgcgagacaaactcaacaagcgatctttgggcaaggttttcactggatgaatcataaacaccaagcaaacaccaaccataaaagccagcaaagcacttgcagctttttggaggatccgcttatgacgatctatccactctttcatttcttccatccttcatgctctttctattcaaactctttctattgtatagaaaattagcgtatttgtctcgtcttatcccaaaaaagaggcgcttgcctctttcttttattcagtgatttagtagctgtctttactgctcaagagaaaatctccattttcttggcgaataaaggtcaaatccacgtagtccccgtttttcttttggaaatccatgaccaattctatctcgtctgaatcatcagatgaactcaccgtcagattgactgcatcaccgtatttttctaaaagctctttgtaagaggttcctccagcaccggtctcactatttccaactttgaatccatctgcaaagttgtcctcaaccgtaagatttttcccaaattgattaaattcaaatttgacaagctgtaattgttttcccttcttagagtaggtcgctttgacctctttattataagagttatcatcccagaataatgtcaattctccattatcaaattgaacagaactagcctttccataagcgtcaaccatttcctcaggagtctccccatcatccgttctagtcaaaaactgaagttgctcgatatcagattgttcccagctaaaattggcttccgcatcttcagaagtcaattgctccaaatcgatattggaaaaagaaccagactggttgcctgaccaagaagtctgctttctagatgatgacgtgctagggctagcatgaccaattaaatagccgctgacaccaccgataagaagcccaactaaaattccaagggcaaaacgaatcgccttcttgtctgcagtatccatcggtcttccaacaggagaaagaggagcttgtggaataggtgtctcaggaacaggcactgtttgcggaccaattggttcagctgccatattttgaggagcttgaggtgcaggttggaatggaggagtcggttggggagcagcaactacatccggatgttctccaacagttgcttcatccacctttggaagctccaccgtttctgaaataactggctcgtttgcctcttctttcattgcttccgtctccgtcactgaaaggccactagcttctggaacgaccaagtcttcggcttcttcttttgggacaaaggctggcgcagccacatcaaattgaggcgcaccctctacgggagtatatttcataaattgttcttgatctttctcggacatttcgaattctcctttttattcttctcttctactataacataaaaccaagcaaggaccaactcctgtcttgatagactaaaaaagatcggagagatatccgaccttttagaaacttatcttaaaatttcttgcgaagggagacaatagcaatccctgcaagtgagagcaagcccaatgttgccaaaacgacacctgtttcttgacctgtttttggcaataaacggccaactacagatttgcttgagtcgcttgaatgtgaggaagaactagaagaagagcttgagctcgatgaagaagttgaacttgaggaacttgaagatgagctgcttgaagatgagctcgatgagctacttgagcttgaagacgaactacttgagctacttgaactagaagatgagctacttgagcttgaagatgggcttgttgtacttggtgaagtggatcctcctgtctcagaaccgttatagcctgcaatgaaattacgataaattgggtttgaactttcaagtgaatccaccatcaagcgtcctgatccatcgtaagcaagggacactgttacttccccttctccattatccaactgtttaaaacgaccatcatcctttgtggtttgacgaatgtagagtttaacagtcccagaattcagtccagatagatccacatcttcaaattcgatcgtcccatctgctgtattttgccctttagcaacggtctcttcttcgccaccttcagatttgtagatcaatgcaaattggtaggcaccagcatcatgcgcactttctttcttgccttcacgcgctcccactacatcgacacgacctgttttcaatttcaaagaaagctgattcgattcgaacccttcatatgttggtttttgaacaaggtctagctgaccatttttgtactcataaatcgcagcttttgtattcgcagatactgggtgggcaacagccattccaccaagcatagatgaaagtaacaagaatttagtcaagttctttttcataatttttattcctttttcaattattttcattcgtatttcattttataatatgaaacaacaaatgacaacttttatattcaaataactttttatattaaaggatttgagtataaaatccgtgtcttcagctattgtctagctagaaagcctgtatcatcagtattttttaaatgagtttagcaaatgatcaagaataataactagttagtgtttttataactggatctaaggggaaagtttataaaattattttacaagtgaaaaaacgacctcttacgaagtcgttcgggtacaaacgagaatatatggaccttcctttttaaagaccgatttcctttctaatcttcatctccttttaaagccaaacgataatccccatctgcttgctggataaattttaatttatattcatcttcatctgatccagatgacttcaaacggatttccatttcattcgtaatggccttagttttatagtcctggtctgctcttatcgaaatagaggatggggtattgctactaagcacttctttataagatattccacccttccctgttttgggatctcctactttcaatttatcataatcatcggtcgccattggattggcatccgctgtgtcataatcttctgagaaatatagattgcgtagataataatgaccatctattttcataaaggtcagattcatctcgttagcggtcttataatcggtgctttcttcatctgtatcgtccctttcgagtttgccccattctaactcaacagttgtcccattaaatgaaccttttaaagctttcccatacttctttacgacctcttcgatagacatcgcatcctctttgtcatcgtaggtagcgaatttcaagtctccgagatttgaaatatcccaatcaaatgctgtctcttttgggtctatatagcgagaagatatatcgcgttttgagactgtactatctgcagtggtatgtaaacggggataagctttcttggttacggcattcacaccaaaagaatggccaataataagaccaatcactaatcctaaaacaattgacccaatcacacatccaatgaacaagccctttccgcttttttgagggccaggatttactggtacaccaaagggtacctgtgtttgatttatactcatctctcttctatcctcctcttaatttagttccgcaccaatatagcgaaattctccatcaggctgtgctaaaaatttcaaaactttaaaatccccatcaacctcacagagtactgtagccactacacgtgtagacttaaatgtttccccattggcagttagtttgcgctctgtcccaatttcgacggtttttcgatgttttttcaaaaactcagataagcttgtcccaccttgccctgtctgcttgtttccttttttcagacttcgaaattcctttttagtcaaggcgcgattgctcgaggcatcatcgctatcatcatcatcctctggatttttatgctcatacaattcatctaattccgtcacggacacactttttaaataataattgccatcgacttcgtcaaatctcattctcaaattctgatgttcagtagcctttgagtcattccaagtaagctccattgcattctttttatattcaacactggatgctaacccatagacttctacaatctgatctgctgtcaaaccataaccttcccgattggtgtaactcaacaagccaagatccttgaaagtccatgtgaaaatgaccttttctttatccgttacaaaacctgcttttgtttcacttgcttcggtctttgcacgttctaaacgtttaaatcgttgcgactccttacttgtttgagaggattgtccccaaatatatccgctcacaccaccgaaaagcccactaatcacaagcgctaaaagtgaaaatagtactaattttttccacttgtgctttggcttagttggataggaccactgaggcggaagcatttgtggatttgtttcttcaaatggataagcagggccctgcatttgaactcctctcacctgtccttctccttgtggtatctcttgcatctgtggctcttccggcactgaaaaaggctgtttatcttctcttgtcatactctctcctttttgattctctttgtctcatttgacgatcatagtgagtgaaaatcatttgatgaacaaagtataaaaatgctccttctactatatcataaatcacctgaaggcgccaattcatcactaaatggggaaatagatacaaaaaaacgacctcttacgagatcgttttgtctattgattaaagacgagcgttgagttctgctccaagttcttcaaatcctggtttaccaagaagagcaaacatatttttcttgtaagcttcaacacctggttggtcaaatgggttgatcgcattcaagtaacctgaaagggcgattgccaattcgaagaagtagatggcataaccaagagtgaaggcatcttgctcaggaagagttacgtacatgtttggcacgtcaccgtcagtgtgggcaagaagaacaccgtcagttgcttttttgtttacgaagtcaacgtcttttccttggaggtaaccaagtccatcaaggtcttcttccaatgtagggatgatcacgttcttacgtggtttgtccacacggacaactgtttcaaacatgatacgagttccttcttggataaattgacccaatgagtgcaagtctgttgagaagttagctgaagttgggtagatccctttttggtcttttccttctgactcaccagccaattgtttccaccattctgagaagtattgaagggatggttcgtagttgaccaagatttcagttgcataacctttacggtaaaggatgttacgaactgctgcgtattggtaagcttcgttttctgaaagtttgtctgaagtgtaatctttacgagctgcgttcgcaccttccataagggctttgatatctgcgcctgatgcagcgattggaagcaatccaactgctgtcaagactgagaaacgtccaccgatgtcatctggaactacaaatgtttcccaaccgttggcatctgcttcaaccttaacagcacctttttggcggtcagttgtagcatagatccgtttgttagcttcttcttgaccgtatttcttcaccaaaagttctttgaagacacggaaagcgatcgctggttcagtagttgtacctgatttagaaatcacgtttactgagaaatctttatctgctacgtactctaccaagtcagcaaggtaagttgatgagattgagtttccagcataaaggatttgtggtgctttgcgttcttcttttgtttgcaagtttgcaaagtggtggttcaagaagtcaatcgctgctttcgcaccaaggtatgacccaccgataccgatcacgaccaaaacatcgctgtctgatttgatttgttcagcagctttcaagatgcggtcaaattcttcacggtcgtaattttcaggaaggtccaaccatcctaggaagtcgctaccagcacctgttcctttgcggatcaattcgtctgctgcagttacttgtgcttgcatgtattccacttcatgtggggcaacaaatttatctaaaacttttgagtagtcaaatttaatatgagacatgttattcctccaatatttcttctcctctatgatatcgctttacagggatttaatcaagggaaaccatcctgtaaaacgttttcatttgctaatttttttattttcacaaatcaagcaacgacgcaatagcaatcgtttgcatatttgcactattttaggctaaaaaatccaaaaaagaagcttctcacgaaactctattttttctcttttattctttaaataggaaagttatttctacatgactctggtgtgtgatagccctcacgtcgcttcgctcctcaggatcaatatctctaaactcggttgcgccttacaggcttttttcattttacgctatagccctcacgtcgctttgctcctcagggtcaatatctctaagctcggttgcgccttacaggctaatttcatttcacgctatagccctcacgtcgcttcgctcctcaggattaatatctctaacctcatctgcgactttcagtcttgattcgttaagagcttcatcggtttacagctttttccctaacgggaaaaactgcatccattgctctaggattcatctacgccttgcaggctcgattcatcaagagcaatagaaaagagcacacagttcacttcgcttagggctgctggattcctcccctgacccgcttcacgcagaactgttgctccactaattagtataacacaaactttcttttttggctaattttctttactttttcctgcgatttctgaaaaagttctgcataatcgccgcacattcttcttctaaaaggccgctttcaacctctacgcgatgattcaaccgctcatccgtcaggatatcgtagagactgcccccagcaccgaatttctggtttttcgccccatagattaccttgggaatgcgagccagaccgatggcgccactgcacatgacacagggctcaatcgtgacaaaaagcgtcgtatccagcaggcgccagctattttcacgctgattggcctcctcgatcgccatgatttccgcatgcatgaccgcccgctgcagctcctcacgcgcattatgtccacgcccgataatctgaccatccttgaccaagacacagccaatcggtatttcatcattggcgagggcaatctccgcctccttcagggcttccctcataaacatcgctttttcctctatcgtgtagtccatctcttccttcttccttttagtttctttgttcattataccataggcagcttacgactcacaaaaaaagccgccgattgggcgactcttatgggagattattatgaaaaagtttaggaggtttaaacaaagttaggaggtctttgtttatgcttctagtatagctggcctatcttaaataaagcttaagttctctgagtattgatgattttggaaatatcaccacttagaatctcaaaaatatctgacaaattgctggcttactactatccgctttgtcgcagaaccaactattgtggcatcgctcatcctttacgtaactcaaggatttggtcatagcgctcttcttcatcaatatgatgggctatttctagtaccgtgatcggcaaagaaaagattaggtctctaaccagacgactatttttttcgtccaaagctgatgtcacttcgtccgctaataaaatatccttctcgcgtaagagaaaacgagccaactctaatctgacacgctgacctcctgaaatgttttcaccattattatgaatttctacattcaaaatatcctgaaattcatctattaagccaactcggtccaatacctccaataattcatggtcctgaaaaggctgaccaaaagttagattatagcggatagtatcgttaaacaggaagggatgctggctaattaaaccgatattcccttggaaatgactcgttatttgatttccatcatactgaacgaaaatgtcaccctcatcacatacttcttctcctaaaatcaagcgaaaaagagtcgtctttccagacccgctcggtcctttgattaagaccttctgacctactgaaatcgtcgccgtcaaatcagaaaaaagctgacgttcagcaaaactttttgaaatatgatttaagcgcaacgattcgagattttcaacaaattgatcctttgtctcttcgaaatcaggttcttcctcgataatcttaaacaggcggttcgcagtcggcaaggcaccttggagattggctgcactgtacatcagagtttggatcggttctaccagcatccccgcagcaacatacatagagatgaggcttgtaatagaaatagaatttccctgtaaactcaaataaaagcctaaagcaagaggaacaacctgactaaaaaagaccataaatccattaaagaaaaaaataatattatgtgtgaaacaaaatctttggatggctttttgatattctccgtttaaatcattcacgcgctcttcattcagcctcatggcctgattaatccgtaaggtttggctgccttgcatactatccgagacaagcccatgtaatttcgttctaagcttggaccagctgtctcccgaatcttgtaaacgacgattcatgatgaactgaggaataggtctcataatcgtaaaaatgacaaaaataagtcctaagagaaaattttgtgaaacaatataaatggctgtaacaagggcgacaaatccccaactcaccataacatttatattttccaaataattatcgcccacatattccatatcttgagttagcagactaactttttcatcattggaaaatttaggattcaatatgactttcttaaataaaagggcacggacacttttgttgatttctcttcggaatatattgtgcgaatggtttgaaaacagcatcagactataaataacaagatagacagacaaaccaaataaaacaaaattgagaatttttccataagaaaggccgtcttgatctaacttcaaggccttcgttaaaatcagaggttgcgccaacaccaaaccactattcacaatacgccctaaaaaaataggaaaaagatacttcttatcaatgtacttataaatatttctcataattatcatccatcaaaatagagggctagcacaaccctcttctctaatttatttaaaatcgtgattatttacaatcacaattatagttaaatactctaggtttagcattcattttgtcatcgaatttgttattcactttaaccttcacagaaaattacaatctccatgtgtcaaaattgttagttccaataattcagcatctgtatcgcttattttagatagatacttttcgacctcatactcaccctcacttaaatatttatttttatcaagataagcatgaaactctttcctaatcacatcattgctgtcgactactctattcaattcattcgtaagaaaaaatgaatgattggttttagtattaaaatacaacgtaccatcatcagtactatattttaatatatatcgtgacaaattcatattatcacctcttaatctgtgtgacttaacctacagtaagtatacaccgatagaaatattaaataaagcaatattcagcagattagaaaagttccaacttttaatattttggaaaaggttatcctataaaagctgcaatttcgccaacttcttgagcaatataggtggcgccggcttcttccaattcttccctgcttccaaagccataaaggacaccgatagaatcaagcttttgcgcttgagcgccaagcacatcgtgctccctgtctccaatcatgatggtatgcgccaaatctgtaatcccattttgctccaaggcatactggataacatcgctttttttactacgttttctatccatggtcgcaccagcgacaaagtcaaaataatcatacaaaccaaagtgtttgagaatttgaatggaaaattcttcaggctttgacgtagctacaatcaactgtttgccagcctgcttgagagaagccagcaagtcaggaacgcctagatagacctcattttcataaaggcctttttcggaaaaatactcatgatagtagtcaatggcctttaaacattcttccttagaaaatccataaaagcgctcaaaagactcctgcaagggcggaccgatgaaaactctcaatgctttcttgtctggcacttgaatcccatattttcctaaggcataggccaccgagttggtaatccctagttctgaattggtcaaggtgccgtctaggtcaaataaaatcgtttgatacattttttcctctttctgctttcaaaaagaggctgggacaaaagtcctagcctctcaattgtctttggattgtcgagcaagacgcagtggttgagtgggctctactacgctgatttcatcagcttttacagccctactcaactgtgcggaggtgggacgatgaaatcgaattctaacgaatgaccgatttctgtcccactctcttatcttcatttgcttataaactagaccaaacactttccaagatattggtttgctcgcgacctggtccgactgagaaggtcgaaatgcggactccaaccagttcgctgacacggcgaacataattgcgggcattttctggcaggtcttctaggctgcggacaccagtgatgtcttctgaccaacctggcaattcttcatagatcggcttgcagcgcttgagctgctccagacttgctgggtaatggtcgatgcgttccccatccaagtcgtaggctacacagattttcactgtatccaagccggacagaacgtcgatcgagttcaagctaaggttggtaattcctgacacgcgacggctatggcgcatgacaactgagtcaaaccaacccacccgacgcggacggccagtcgttgtaccgtattcatgccccacttcacggatgcgctcgcccacttcatcaaacagctctgttgggaatgggccatcaccaacacggctggtataggctttacatacaccgacaaccttgtcgatcttgcttgggccgacacctgatccgatggtcaccccacctgcgactgggtttgaagaggttacaaatggataggttccttggtcgatatccagcataaccccttgagctccttcgaagagcacgcgcttgccgttatccaaagcatcgttcaagatgacagaagtatcggttacatattgcttgatttgttgaccatattcatagtattcttcgaagatatcgtcaaatgacagagcctctgcatcataaagtttggtaaattgacggttcttttcttccaagttgatacgaagacgttccgcaaagacgtcgcggtccaaaaggtccgcgattcggattcccacacgcgcagccttgtccatataggctggtccaatccctttaatcgtcgttccgatcttgttgtctcctttagattcttcttggagacggtccaattcgatatggtaagggagaatgacatgagcgcgatctgaaatgcgcaaactgtccgttgtcacaccttcttcatgaagataagccaactctttgaccaatgacttaggattgatcacaaccccattcccaatgacagaaatcttttcagggaagaagatacctgaaggaatcaagtgcaacttgaactttttgccgtcgatcacgatggtgtgaccagcattgtcaccaccttggtagcgagcaatgacttctgcattggctgataggaagtctgtaatcttcccttttccttcatcaccccattgggttcctactacaactactgatgtcataattctttttcatataccatagataggatgctatctatgcctttcttcaaactaagggcaggagtctcacctgcaagtttgtcttacactctattataagcaatttttgatgttttttcaagatccactcagctatcgtttatttttctccttcctttttaaactaacttctctatgaaactcgtcttttacttggaaattgcttctttctagaaataacgttcggaattttcttttcttcttgcccttcttctgaaacgactgattttcggaattctccttgtccccactttgcttgatttgtgctaaaatagtaggtatggacaaaattattaaaactatctcagaaagcggcgcttttcgtgcctatgtactagacagtacagaaaccgtacgaacagcccaagaaaaacatcatacacaagctagctccacggtcgcacttggccgtaccctcattgccagtcaaatcttagcagcaaacgagaaaggagatactaaaattacggtcaaggtccttgggactagctcactcggagccatcatcaccgtggcagataccaagggaaatgttaagggctacgtgcaaaatcctggagtggatatcaagaagacggcaactggtgaagtcctggtgggaccatttgtcggaaacggagaattcctggtcatcactgactatggtacgggaaatccttataactccatgacccctcttgtcaccggtgaaatcggagaagacctggccttttatctgacggaaagccaacaaacaccttctgcagttggactcaatgtcctgttggatgacgaagacaaggtcaaggtggctggtggtttcttgctccaggttttgccaaatgccaaggaagaagaaatcgcgcgctttgaaaaacgcatccaagaaatgcctgccatctccacacttttggaatctgaagaccatattgaagctcttcttgccgctatctatggggatgaacctttcaaacgtctctctgaagaagaacttcgcttccagtgcgactgtagccgtgagcgtttcttgaacgctttagcaagtctgccagctagtgatctaaaagagatgaaagatgaagatcacggtgcagagattacctgccaattctgccaaacacactaccactttgacgaaaatgacttggaggaactcattcgtgacaaatcttaatacgccatttatgatcggggatgtcgaaatccctaaccgtaccgtcctagccccaatggccggagtgaccaactcagctttccggaccattgccaaagaactgggggcagggctcgttgtgatggaaatggtctctgacaagggaatccagtacaacaatgaaaagacgcttcacatgctccatatcgatgaaggagaaaatcctgtatcgatccaactctttggaagtgacgaagatagcctcgcacgcgcagctgaatttatccaagaaaataccaagaccgatatcgttgatatcaacatgggttgcccggtgaataaaatcgtcaagaacgaggctggtgcgatgtggctcaaggatccagacaagatctactccatcatcaataaggttcaatctgtccttgatatccccctcactgttaaaatgcggacgggttggtcggatccttccctagcagttgagaatgcgctcgctgctgaagctgcaggtgtctctgcccttgccatgcatgggcgaactcgggagcaaatgtatacggggcatgcggatcttgagacccttcacaaggttgcacaagctctgaccaagattccatttatcgcaaacggagatatccgcacagttcaagatgccaaacaacggatcgaagaagtcggtgctgatgcggtcatgattggtcgcgctgctatgggcaatccttatctcttcaaccaaatcaatcactactttgaaacaggagaaatcctgcctgatttgacttttgaagacaagatgaagattgcttacgaacatttgaaacgcttgatcgatctcaaaggtgagcacattgccgttcgtgaattccgaggtctcgcccctcactacctccgtggtacctcaggtgcagccaaactccgcggcgccatctcgcaagctagcaccctagcagagattgaagaactcttacaattaaaagcatagaaatacaaaaagcaggacctcatgtgaggtcctgtactatttttaaataagttaagcaattcggcaaagaaatataaatatgttttaattttttgagcgaatcaaaaaaataccgaaactttccgctgtgagaaaagtgcctgaaacacgattgtttcaggcactcgggagttttgagaccttaggctcaaaactaagtcatggaacttcttcgaagttcgctgacgtccgtactcacctaaggaaagtttctaagatgactttgtcattaatctaaaacaggacctcacacggggtcctgtttctatagattatctgtttgcaggccgagttgtttgactctggcggtgtagtaggtcatgatcaaaaagaggttgactgtgatcaaccagatggaccattggtgaatgaaatgcatgaggatggcgacgctaatagctcctgcaacaaaacttccaacaacgattccgtaattcatagcctgacgccgatactcgtccaaatcaccctttcctcgagtgattcggtacaaggccgtcagcatcttgcggtaattgccggaagtcataaagatcacgtaagggtgggtttcaatcaagcttcctgtaaaggtcaacatcatcatccctgtcccaaaagcaataaagggaacttctacaggtggtatgacagacaccaagggaatcaggagtgtcaccacaaacaaaggaatcaacatcttggtccgccaaaaggctgtcttgcgatactctttgatatggagggcaaccacaaagccaatcgagaaaaatagaatagatgaaaaacgcatgatggtattttcgacacggggatcgtgccaatcagcgatgagaagcagtaggttccccgtttgggtcgcgaccaaactccggtagtgcatgtggcaaaagacatcgaggcctcctccgataaaaccaagcagagcccccattagtcgtgtattttgtggtaaaattattttttcttccatagtcttgtctcttttgatctcaattatgtttattataccactttgcacacaagtggagcaggaaaaatcagaaaaagcccttggctactactagtaactaagggctggtagaatgaaccccgctcgatctactgtttcaggcgataggtcttgcgtggttttttcttaggtactcgcttgacacccacttcttccacgaattctccgaattttacgaggaagttattgctaacgatgggacgtcctggattgatcaaattgaccaattcggttgcttcataaacggtgaaaggctcctctaacagatagaggaaggttggattccagtcgagacgtccctgaatccgcttgatcgattcttgaatgatttgatagtggtcaaaggcaaaatcagaagcagttaaaacctttccctctagcaagcactgggactttttgaagtcgacatcgagaaaaacgacatccttggcatcgtcacctgcatgagctaagtctactgcttctgctggcagatagaccagatgggcaatggtaatgacccagcctctggggtcccgctcaggggtggaaacggtcatgagctgctccaccttattcactggcagatcgagcccaacttcttctttgacttctcggatacaggcatgagtcgcatcttcatccttgttcacaaagccccccaccaaggcgaggcggtgttgataaggatgggccttgcggcgaatggctaggagcttgagcttgccatcaacaaaacagtaagccaccatgtccgctgtgacacttggagtttcataagttggcaggtcttgctccttgtaccacttgagaaagtccgcttcactagcgaccgtctcaaaatactctttctccgtcattcctgctggaatcgagagacttgccatctaaaccacctccttcttgagggctttggtccattggtaccagcctactaaactattgagcgtgtaaacccagtacatcccttgaatgtgaagactctgatcccaccagagatagatactaaagacgttggtcgcaatccagaagatccattgctcccggtaaaggcgggtcattaggagctggccgaccccattggtcgcatcggtgatactatcgcggaaagggcgagcgctatggatgctctgatacgcaaagcccataccgatccaaatcacagcacacaaggccaagtagcgcatccactcaattaagttcaatttcttggcttcaaagtgagattcttcgaccttaccttgatcattgatccgattagagagccaaacatagagaccgatcggttgcatgatgaagaaataaagagttgtcagaacttccccgtagaagttcttattgagggctaaaacgaggtagatcgctgaattcactgctccaaaaaggtagttactagcacgcccttctgcaactaggatgacgcagacaatgcctgtccaagaggcaaacagtcccagccaatcatgctgtcctgtccgattggtccattctaagaagaagggaacgctggaaagaagcaggagatagatccattgaaaggctgtgcgtcctacaaaaaggtccttccaaaggagtttcataatattgacaaagccttgttttttcgcttctcggtgaacatttttaaagtcttggctaaaagttgtgaatttttcagatagttttttcataagctgctccttagtcggcttggtagatggcatcgatcaccttcttggcttcttcgtagttgccgaggtagtctgatgcgaggaaagtggtcggaatgtttcctaggtattgctggcgcaattggtccaggtaatttgaaaagctgctgcggatctcttcgtcagccatggtcatatccctgaaaccatcattgacataagagccgatcggctggacaaagaggatcaaatcccatttttctttggacagaatactgacaaataggttgtcgaaggtatcggtcatgctggtatcctggccttcgacttccatatagtagtcgtaataacccttggtcaccagggaattggtatctgcgatgaccaggcctcgattggcactactatcgatgagcttggaggtttgatcatactgtcctaagaggaggtaatagtaatctttcggtgtgagttcatcatcccgaacattgttcttgatctggtattcacgggcatactcaagactaacaggtgcatcgtaaaagcgggctaaatcctttgcaagggtcgttttcccgttactggcgctccccatgatcaaaactttttttgtaaactggcgacggaagggctgggcgatgtatttccagtatttgcttggattttcccggatcatggtaacagagatcccgaagcgacgctcctctaagtgaacttcaaatcctctagcttccaactcttccttataggctttctcccctacataaaagatcaactcttctgtctctgtttgatactggatggtgtcaagggctgtttgtaaccaaggctcccagcccaagggataacgaggaagttctgtttcatctagcttatagacttgggtcaactcatcattagagaaggcttcgcggatataacggaagcgtttttgtaaagtcaacccgacttcttcgccacgatccccttcataaccagatacgatgacacgaacgcgatcacactgacgcttggcccgctggatcaggtcaatatgcccttgatgaagaggcgcaaaggttccaaaaaccagggcaattctttcttttttcatatgaactcctttttataattttttataaatatgttttctttatgtttttattataaactatattttctatctgtcaatagttttttataaaaaaatatatttttcttcaaatcaacaaaaaaagatctgaaaagagaagcttatcctttcagatctttcgaattttattcacgagtgagggagtggctgacaccgtctttcagaaccgtcacactagatacagagccatcttttccaactacgatatctagactcgctgcagacccatcgcctgctgagagattagcatggtaatgaccatcatccaaggtatagttataagcactgataccataggctacgggttggccaccaggcagttggatggtcacttgaccaccttggccaatagtgactccagtatcacgtttgtcagaccaatttccagctgctgcagagaaatcccctgctgctacagaatagactcccttgtattgggcattctcagtagcagaagcttgcttcttagcatgggcatgaccgtcttctagacttggcaattttgctttcgctggtgttgctggagtggctacttcttttgttacgggtgctgctggtgtcgcttctttagctggagcaggtgtttgactagctgcagcttggttatttttgctaccaacagtatgactttcttctgatttgctatcagaggatgaagaggcaattggatctttactagtgatcacttttttcttagaagaagaacttgtttgtttaacctgactggtctttgaactgcttgcttctgaagttttttcttctttattcccgccacaagctcctaggaaaagactagctgtaagagctagagctgctagggaaatgatttttttgtttttcataacagaacctctttttgtaacatttgtaatattttgtaacattattgtaacactgttatatgaggctgtcaatagtttctcaaatatttttctaatttgaaagaagttttaagtaagttcctaagccatagtagaaaaaagctggacaaactagccgactagagcacgtagacaaactgttcttttatacaaatctaatactttctataaagataaaataattttattcgttagggttactcaatgatctactgaaactttccgctgtgagaaaagtgctagaaacactattgtttctagcactcgggagttttggaaccttaggtccaaaactaagtcatggaacttcttcgaagttcgctgacgtccgtactcacctaaggaaagtttctaagattactttatctataatctgaagccggacaaactgtccagcttctcattatttatacacttcttgatagaattcgatcttgtctccttttttaacggtggtttcagcagcaccttttggagccatctcgccattgatcttgtacatccagtaaagacctttggcttcatcttggctgtgaccgtcaattgaggtgatcatgccatttttttcttcaatcttgtagttggctttgagcactttcatgaggttgctctcttctgctactttcaaggttttcgattgcgctttttgaccttctggcgtcacgctaattgtaatcgaaatttcgtttttcttggcaacttctgtgctagaagctgttgtttgattgtttgtgctatgagacggagcgcaactcgctaaaagaagagctgcaagtaaggtcatcaagctagaaatggtttttttcaacataaaatctcctaaagatttgatagataatgggatagaaaatgatcgtcgacagagcatgggcaaggttaaaactaaaaccattgaccaaagcataggtccaccaaggaatatggtatatcaaggcataaacactatcgatcaagaccccataagcaaaggacagtaggcccacaaaaaggatctgaaggacaaagggcaaccacttgtaactgatgcgccaaatgagcatcaaacagccaaaggcgacaatctgaaagaacacaatcaggctcatccccaggaaaaaggcggagacaaacatggtgatcatcatcacaagaaaagcaaagctatacccttcaaatatcaccaagagaaaaaagatggcagaaataggttggacatttgggaaaggggcaaaagcctgacgtagagcgacacaaagggccgccaaaagcgaaatacgggttaatcgctgaagcgtcatgacatcctcctagacaatctcaaacttgatcgttccggctgtcgttccaaccttgatggtttgcccttcttgggcttggcctttcagcaatagctctgctaactgatcttccacttcggtctgcaagacacgacgcagtgggcgagctcccatttctggatcatagcctttggttgctagcaacttgagcgctgaaggctggaatttgagggtcatgccttgttctgccaaggtcgcaatgagcggtttgaccatgactttcactacctgctgcatgtcctcgcttgagagactatggaagaccaccttttcatcaatccggttgataaactctggacgataggtcttcttcaactcttcaaacatgcgtttttccatattggcttggtcaaagcggatatctttggccccaaagccaactgtcttatcatcccgaagggctgtagctcccaggtttgaggtcatgatgataatggtattggagaagtcaatcttccggcctttgctatcggttaagactccgtcatccaagacttgcaaaaggacattgaaaatatctggatgggctttttccacctcatcaaataagagaactgaatatggtttgttgcggactttctcggtcaactcgcctccttcttcgtagcccacatagcctggaggggcaccgttgaggcggctcgccgcgaatttttccatgtactcactcatatcaaaacggatgagggccgattcatcatcaaacagaacctccgccaaagctttggctagctctgtttttccgacaccggtaggtcctaggaacatgaaagaaccgatcggacgtttattgctacggatacctgattgattgcgtcgaatagcccgactgatactcgaaaccgcttggtcttgaccaatcacgcgcttgtgcaattctgcttctaagtttaggtacttcttggcatcggtttgggtcagtttttgagttggaataccggataattggctcaaggtcaccaagacatcttggtcagtgacttcttttttgtagacaacgggagtggcctctacttctaagagctgggctgctttcttccacttgccgtccatcaaggcccggtctaaggcggtcaactcttcttttacgtgaccgttggaatcgcggttttgtacagtagctgccgcttcatccaagagatcaatggctgaatctggcaattgacgactggtcaaatagcggtgggcatatttgacagctgtttcgatcgcttcatcggtaatggtcacatgatggtggtcctgataggtccctttcaagccttggagaatttggatgctatctgcaacacttggctcttcaatggtgactttcgcaaaacgtcgagagagggctgcgtctttttcgatatgcttttggtactcatcttgagtcgttgctccaactgtacgcaaggttccccgtgccagggctggttttagaatattggctgcgtctaaggtcgaatcaataccggatcctgaccccataatggtatgcagttcatcgataaagagaatcacgtgaccgtcttcttcgatgtcctggatgatattgttcatccgttcttcgaagtccccacggaagcgcgtccctgcaacgacattcataagatccaattcaaggacacgcatttgcgcgatttcagctggaacattgccactagcgacacgctgggccagacctaatgcaagggcggtttttccgacccctgcttctcccaccaatacaggattgttcttcgtcttgcggctgaggatttggatcatgcgtgaaatctctgcatcccgaccaatcacaggctcaagctggcctgcacgcgccatttctgtcaaatcacgggtataatcttcaagacctccactggtgcttggtggcatgcccatcatatttcccatggtttggcggttagggttttgggcgcgatagagactccgaatggctttaatatcattcttgtcccagcctgccttgtcttctaaattcttgcgaagggaggcaacgggaacacccttgtcttgctctgtaaaggcaaagccggcaaactccatgacttggctagccaaggtcccacggtccgctagaagagagaggagcacatgctctgttcccaaggtcttggcatgaaggacctgggcaatctcctttgcgtgcttcataattgcttccatccgataagaaaatgggaagatttcataccgattgtcgctttgaaaagcctggcctgtaatatgctccgccgcatcctgaaattcgtcaatctgcataggataatcgttgagtacagaacctgccacgctatagggattattagccatggccgtcaaaagatgccaagtgtctaaggtattcccttggtagtggcctgctagtatttgggccgcttctatactttctaacagtgctgttgaatagttcatctagtcggtatttccttttctatctacttgttgaatgatttttttcagcatagttgctcgtatgatgagagcatctcgacctagaacctcatcggaggtcgtcgcaaagaacagctgagtctcacgttttgtcaataatttttcttcatggagcatctggaggatatcctggaagacctgctggctgatggtctctccaatattggctgccaggtcttggagcatctgatggtgatctgaaaactggaccttgccaatacggatataaccgccaccaccgcgtttactttctacaatatagcctcgactctcggtaaagcgggtcttaatgacatagttaatctgactagggacgacctgaaagacatctgccaactcacttcttttgagctctgccatgccagcttgagccagcaaggccttgatataagcttcaatgctatcagatgtgttcttatttgccatgatgctcctttctgacttgttttcttctagatagatgctctactctttagcgcataaagatgcccttggagtgtttgttttgatcattgaccttatttgactattatacaatttttatggctgtaaataaagcaaagactctatggaaataggaatctcttaagaagacaaaataaaagaggctagtgagaactaacctcttatgagaagaatcaactactctttgcgacgagcgaatttctcaccacattcacaaaacctttctttgaatatcggtttaagcttctttccatttcgactgttgaacgacttcttccatcacttggactgtcagctctggaataaaaccaaccagacttccttgatccggatgcaacaatttgaccttaaagtcatagacatctgtcgccttgcctgaaaaatcaagggttgggacttggactgttttttctgtctctccatctgcaaactcaagagtgacgttggtatctttgtagaccttgccatgaacccctgttcctggttctgtgattaatttaagactagtgcttcctttagaaccgccttttctcttgacgacgatttgcgctgggtcgcctttcttaacggctagggtttgctgggcaaactcaaagagacccttttcttggttattgagggcataaatcccttccgttgcgatcgcatctcccttgctattgaccaaggtcaaagtatgggctcctgctttcaaatccggtgtttcatagaccttttggctgcgtttgcgggttggactttgggtattaaccgtcgctagtttttggccatcgacatagacatccatttccccatgaccagggtctacggttgcgacgacataggctttggtgccttcaaactgataggtcaccgaagctcccttttccttggtccacatagaggtgcctcgaacgcattctccctcttcattccattggctattggcacgatcagcagtccggtcagaatgataggccaaaccaagcggatagccatccgtttcttcaatgctagctggcgtcttatagacagagacgccgttcaagattggagtggcttgggcatcggtgatggacacccggaggtagcggctatcaactggttgccctttgatcaaacggcggtatccaacggttgacccagccccaaaaggaacccattgcccattcaccgctacatcgatggtgaaaccggaaatccgttggcctttctcgatagtttctttgagctctaccacatcaaaatattgctcttttccaagatcgaggacaaaagagccggtcttggcatcatcagcaggggcccaactggttttttcatcgccatctgttaaatggctggccttgtagagaacattgcgccgtgtcgagtcatcttctaccaaagcgcccaccgcatagtccacgctgtagagttgggccagggtctggcggaattctttcaaacgggccacatccgcatccgcaaattttccgtcttggttaggtgggatattgagcaaaagcggggttccacgaccaaccgatttgaagtaaatgtccatcaattcgcgcaaggacttaggctcttgattgtcatggtagaaccatccggagcgaatggaaacatcggcttctcccactgagtattgcttcccttctggatccccgtgattgaggtaactgttggatggattgttgcggatcttatctggattgaccttttgccaaaccggatctccggcaatccccttttcatttccaatccaacgaacattggtcggctcagctgagaagatggcaatatccccttgggccttgcgaatggcttcaaaccatttgtcaaaggtataggtgactttttgagccccatcgccacgcgctccatccatccaaacttctacgaacttacccttgttcccatattttggatcttcaaggatttctttgagctggttgaggtagtattcgttgtactggtcctctgtatccacatggtagagagggctgtgagcatcccaaggggagagatagacccccatgtccatgtcatacttgctggcagaagcagaaacctcggctaggacatcgcctttcccttccttccaaccacttttagcaatggtatggtcggtgtatttggaagggtacaagaggaagccatcgtggtgcttaacgaccatgatggttcgtttaaaaccagcatccttcagggttttgatccactggtcggtatccagatgctctggatagaaataataaggatcttcttgtccatctccccactcacgatcgtagtaggtattcatcccaaagtggatgaaagctgccagttcttcgcggtggtattgcatctgagccttgcttggaagtggtccgtaatccgcaatctcagtctccgcatctagagaagtggctggttgggtggcttctatcccttggctgactgtgcgattttctttctcactagtagctactgaggtatgctctgattcttcttggtgctcgttcacagctgtttcctcctatctttgctttttaacacatctcattttgatcgccggtgactctcactattttgagcttgctcatatttagttatttgaacaaaaagcccaaagataagctagtgattgtctttatcttcaagtatcctagactgtttcaactgttcggcatcattgattaagtgtaggcggtattcttgtaagatggtgccatcttctgctttgtggatgacgcggattggctctccttcatggacgctttgcacaaccgttgcaagaccgtgatggctagctgtcgcttccacttgtggataagcccgatcacgcgcatcgatgtcgtaatctgtcacacttgggttgacacctggcaagacatcgtcattaacacgaatggtcagctgactcttttcttctgccgcaaccttattggcaaagatctgaatttctgaaatagagcttccacgtttgccttctggtgtcttcatacggatccgaacggcataggtgtcgactttatcaaaactaaaatgattcatcttgccagctgctaccggttcttcaacggttaggtggctgacttctttccagttagctggattgttaaatggatggtctgtttcgtctttaacacgatttggattgcttggaactgttgggatttgttcccctgtatagtactcaatcacatactcacttggagccccaacgccgtggtcttcgtggaaaccaacatggaggttgtccactgctcgcttggtcaagataccagagtccccaaacaagatcccaacagaatcttccgcattgtcacggccccagttggtccaacggttagctggagcatcggtaaaggagatgaccttatcattgaccttagcaactggatctgcatcattagagtcacttgcaaaagcaagtggcaagactgatcctgtccattgttctgctacgttggctcccttgactgtgtttgcggaaacacgaatatgaagacgcgttggaagatccgttccttctactcgaccggagaggacaacttctccttcttgggccaagagttgcggatcgaccgcatcccaggctaccttggcagcataggtcttgccattggaatgataagtccggacgctttctggaagtgctggtttttctccgactggagtggtggtgctgacttcttctacagcgataatgccttcaacggtgacttgggcttgggcttctttctctacaccctctatatgacctgtgactgtaaagttatggtaatccttgacttgatctgctgttacggcatcccaggtcacgcgtttttctttcgggaatcccttatcatactcgaccaagactgtctctggaagagctggcaacacgttttgatcggtactgattcgtacaggacgcaccttcacaaccgtcttttcttcaggatttggtgtgatggtaaagcttacttctcctgtttgtccttggaagttggcttctaaatgaaccaatcctgcttcccgcagttccaaacctttcttgcttgcaaccgcttttccttgactaccagctgttgttttgatatcgatttgatctgctttcagacttgctagactgccatcttggtaatgggcaatgacttcaagtggtaccgtttgatcttccttgagttcctgtccttctggcagacgcaattctaaacgctcaatctgtggactttcttcttggaattggaccacataggtctgtacaactcccgtattcttagcagtaacatagatttgagccttcaaaccattttctcgattggcttgtaggaccgtcatttgagcattttctgcacttgctgtgacttgacctggctcttgaccataagttagcgaacggaaaatggtatggttaccactgccaaattttggaagagctactccatctagctgaaccgttggtttcttagccttggctacatctcctcctgcaaccactagtgttgcttgaaccgtttccccattgcctaatattcctgtcgctttcaagcgtgctcctggtgtggacaactgatcttcttgaccagcttccaaggtccattgatcaacttcatagtgagcactggtcccatcggtaaagactaattgcacagacttatccaccgttgctagatctgctccctgtgggatttgtttgatgactggaaggacttgttccacaccgatcacatcgaccagagcttcgaccgtgcgtccttgaacatgacctgtcacacggacttggccggcacggctatagtctgctttgtcccattcaacagcttcttcttgggccttgccatcgctatagaccacattgaccttacttggtaaggccggctcttctcccagataagcactttgtcgaaccggttcgactcccaagacagagcgttctgcttggtccttcttacctgtaaagaggctgacttggtctgattgcaagcgatctgagtctgcgtacagagtaaaggctcccgcctgctcagttgatttgacaatgatcacccctttgccgttgaaggctttgcgttgccatgagccatctgcctgcgctttgtagcgttcacggctggcttgttccccattatcgacaccgacaatttggccttgtccatgcaaatggaaatgcaccacattattggcagttggcacgacacggccttcttcatcaacaatttcataggtaatataggtcaaatccttaccgtctgctgcaatcgcatgttcttctttcaacaagcgaacacctgcagccttgccggctgtttcgacttgatctttcgcaataacttctcctgcttcgttgcgggcaatggcttccactttacctggtacataaggaaccaaccactctagatagagttcatccggatttgccccttcctgataagtccggccatcagctgtggtcttcttggtaaaggtcttcgctccttgtgattccccattgacaatcaattccacactgtgggcattggagaaggtccgaacaggaatccgaccttcttcatccatgacacgattggccaattctgggttgtcccagttccaatgcggcaagagatgcaccatcggatgcttttcagccgatacccattgactttggtagaggtaaaaatcattctttggaagacctgccgtatcgacaataccgaagtaagaacttttcacaggtgtggcattttggttgtgccatggtgttggctcaccgatatagtctgtacctgtccagataaattgccctgcatagccggcatgatcgcggtcaaagatccaagaggctgtcgctgtccgcccccaaccaacccggtcattaccgtagtctgattgttcatagtggcggtcttcttggttgctaccgacccattctctttcagggtggtagtaagagccccgtgtccgcgtcgcagaagaggtttcagaaccataaatgagccagtttgggtgtttagctcgtaggctttcatagttggcctctgaatagttaaatccaactgcatcgagctctgccgctaccttttcatgccctcctgatccatcaccaaagcggaatttatcagctcccatggtgacatagcgagttgcgtccacttccttgatggtcttgacgagacgacgaacggttgcaacagatttgtctgacccatctgcttcaccgacttcgttaccgattgaccacatgacaatggctggattgttcttaccccgctctaccatggtccgtagatcgtaatctgaccaagtatcccctttccgagcttctgggtgagtggcgtccttttcaaagaaacgactgtaatcgtattgtttcttgccaccataccaagtatcaaaagcttcttcttggaccatcaagcccaactcggccgcaatttgcaaggtttgttcactcgctgggttgtgggtcgtccggatcgcattgactcccatgtccttcatctgtttgagacgacggtactcagccttataattttcctcagctccgagggctccatgatcatggtgaagggataccccgtggaatttcgtcgccaccccattgaggaagaagccaccttctggcgtccagttcaaataacgatagccaaagcgttccttttgcacatccaccaactgggaatcccgataaacccgcgtatacaaggtatagagagctggatgatccattttcacatcccagagggttggtttttcaacatgcaaggtttgagaaaggttgattccttgaccagctaaaacagattgcgcctcactgcgcgttttttcgctcaccacttggccattttgatcgacaatttcatattccgcataaatactatgagcttgatcatcctggttgacaatgtggctcttcaccacagtatccactgccccaccttgctgtttttccaacagaggggtcgtaatcgtagtcccatactgcgccaaatgaaccttgtccgttacactcagcttaacatcccggtaaatcccactaccagaataccaacggctacttggttgttgattgaccacatgaacggcgatggtattttcacttccatctgcgttcaaataaggggtaatatcataagaaaaggcattgtagccatttgggtaatgaccgacaaattgtccatttacatagactttggaatccatgtaaaccccgccaaattccaagcggaccttcttatctaaatctttgtcatccaaacggaaggtcttacgataccaagcatccccaccgttcaattgtcccccttcattttgagcaggagagttgtgatcaaaatcaaagaaaatagaccagtcatgaggaagatctaattttttccaatccttgacatccacttgacgcccttctgcaccaggagccgcattcaatttaaaataccaatctttattaaaatcacgttctcgatcttgcacaatatcctccgctacacgattttgatctggagcagctgttgcttccgttcctgtagcacgctcagatgaagtagaaacgggttgaccatcgtcttgagacgctggtttttcctcagctctggtaggggtaatgacagctggagcttccgaatactaaacacaggacgcttttcaaaaaaagactttcccataagaacctcctcttaggattaacaattaaatttgtaaacgctttcttgaatctgcagaaaatcacatattaactataccaaaaaaagaggatcgataggtctcaatttcgctccaactatagttagattaagaactcctttaattagtggaaatctcctacgaagcaaaaaaatagaagccaaaggcttctattttttatgatcttataatcctggttcttgaccaagttcagcagccaccatccaaatattcttttcaagttctgctttagccccaacaaagatatcgttggttacatcgtcgccttcagcgtcggtaacatccaaagctttttggtaaaggccatcaaggtaatggaagatttcaagaacacgtgtcaagctttcttctacatttttcgtaaatgctccacggcgttcttcaatattgctgtgttccaaaaattcagtcatgctagaataaggagtgccacctagagtgatcaagcgttcgctcacttcatccaaggttgcatctaagctgtccatgtattcatccatttttggatgccaaaccataaagccacgtccacgcatataccagtgtacttggtgaagggcaatgtgagcgacgtagagatctgctacgacttggttcaagaggacttttgtttctggaagagtttctttattagatggtgcaaaagttgctacatcagtagctgcttcatgtttcatagttgtcatgttgtttctcctttttgtaatgattctaattaactatgtctttattatatgcttcctccaccagaaagtcaagataaaagatttaaaaagatcatagttgtcaattgagaaaagatacgatagaatgtaaaagactaatcgaaaggcataaccaatgaaatatatctttaccttcctgatctccatggttcccctcgttgaattgcgcggagccatcccttttgccattgcaaatggcattccactatggacagcgcttctgatcggagttatcggaaatcttctccctgttcctctgatcttctttttcgcccgccatatcctcacttggggcgcaaaaaaaccgatcatcggaggcttttttagctggtgtctcaataagggccatagaggtggccagaaattggagaaaactgcaggagacaagggaatcttctgggccctactcctattcgtcggcattcctttaccagggactggtgcctggaccggtgcccttgcagcttctatccttgactgggacttcaaacgcagtagcctcgcagtcatgctcggagtaattctagccggcctcatcatggggactctttccctgcttttaggaatcgatacctttgcacattaaccaaaagactgaagcctcttttttgcatacaaaaaagaggcttcagttcctctaagagtatagacaaactgtttttttttacaaatctaataaattctataaaacaaaaaaatttatttattagaattattcagtcatctactaaaacttttcgctgtgagaaaagtgctagaaacaatcatgtttctagcactcgggagttttggaagtaaaacagttcggggaactgttttagcatgagcttaaaatttgaaaagcgaatgggtccaaaactaattgaacacgggttgcggattgtgtcaaaaagaaaagttttcctagaatctaaagattcttcgttaaacttcctattttgactttatccgcagacgccctttgtatcttaataagtcatggaacttctttgaagttcgctgacgtccgtactcacctaaggaaagttatttagatgactttatcttacaaaaaagaggtttctaatgaaacctcttttatttattcttagttgttaagagccgctgccattgtagctgcaacttctgattcaaagtcgttagctgctttttcgataccttcaccaacttcaaagcgagcaaactcaactactgaagcatttactgattcaaggtaagcttccactgtcttgctgtcatccatgatgtaaacttgtgcaagaagagtgtaagcttggtcaactttagtgttgtcaagcatgaagcgatccattttaccagggatgattttatcccagattttttctggtttaccttcagctgccaattcagctttgatatcttcttcagcttgagcgacaacttcgtcagtcaattgagctttagaaccatacttcaagtgtggaagagctggtttaccaaccattgcacggctttcgttatcttggtcgatgacgtggttcaattgtgccaattcatctttcacgaattgctcatccaattctttgtatgaaagaacagttggtttcattgcagcgatgtgcattgagatttgtttagcaagtgcttcgtctccaccttcgatcacagagataacaccgatacgtccaccgttgtgttggtaagcaccgaagtgttgcgcatctgttttttcaagcaaagcaaaacgacggaatgaaatcttttcaccgattgtagctgttgcagatacatatgcagcttcaagagtttcacctgaaggcattgtcaaagcaagagcttcttcattgctagctggtttaccttcagcgatcactttcgctgttgcgtttaccaattcaacgaattgagcgtttttcgcaacgaagtcagtttcagcgttcacttcaacgactgctgcaacgttaccgtctacataaacaccagtcaaaccttcagcggcaacacggtcagctttcttagctgctttagccatacctttttcgcgaagcaattcgatcgctttttcgatatcgccttccacttcaaccaatgcctttttagcgtccatgacaccagcaccagatttttcacgcaattcttttacaagcttagctgtaatttctgccatttttgttctcctatattttttgataaaataagagggtcgggctgagccctgccctcttaggttcgttacttattgaatgaattaagcgttgtcgccttctacaacttcaacgatttcttcgattgaatcagcttgaccttcagtagctgccaattcagcttctactgtagcaacactgtcttcaccttgacgtccttcgataacagcgtcagccattttcgcagtgatcaatttaacagcgcggatagcgtcatcgttcgctgggatgataacatcgatatcatctgggtcagtgtttgtgtcgaccatcgctacaactgggatacccaatttcttagcttctttaacagcgatttgttctttatgtggatccacaacgtacattacgtctgggatacgaggcatgtcttcgataccgcccaagaatttttcaagacgagcgcgttgtttgttcaacaatgcaacttctttcttaggaagaacttcaaaagttccatcttcttccatgcgtttgatttctttcaaacgagcgatacgtttttggattgttccccagttagtaagagttccacccaaccaacggtggttgatgaagtattgacctgaacgaacagcttcttctgcaacagcatcagcagcttgtttcttagtacctacgaacaagattactgcatcgtttgcagctgcatcacgcatgaagtcgtatgcttggtctgcatattttacagtttgttgcaagtcgatcacgtggattccgttacgttcagtgaagatgtacttagccatcttagggttccagcgacgagtttggtgaccgaagtgtacaccagcctcaagaagttgtttcattgaaattactgccatgagtagtttctccttttttgtttttttctcctctctcagacgtcaacttgcagcacgaccacaagggcaacggtgacacaatggatccgagatgagtatttgctgtcttagacaactctataagtatagcagaaatccctagaattcgcaagctatttgagagattttttcagcattcttcatctgtaatgatttgaaggaaaaagtttttcttgacctatcttgttttttaggttacaatattatatgttacggcggtatagccaagtggtaaggcacggctctgcaaaagcttgatcgtcggttcaaatccgtctaccgccttgataataaaattttttatcatcttttatcttttaaaaattcccctagcaataggggattttttgtttccatttgctccattccttgattattgatataataaaatctcgcctgatcggcgaagcacattagaaagggtcattatgaaaaacattcgtttctttacgatcggccttctttcactagtaacactagcagcttgctcacctgccaattctgcgcaacaagcaaaaacagcttctagttctagaaaaccgatcaaacaatcttcaaccaaaaaatcatctagtaaaccatcgagcacttcttcagacagcactagctcaaatgatttttcagatcgctacagcatggatccagatgatggttcttctctccaatatgtgccgggagctgcatccattcctgagatcgaaaaactcaagaatctccatctgagcactggaattataatgaaagtgaatgggcaagaagtcggtggagacaaaccaacatctagttacgatgatatggtggcagcctttggtcagccagtaagtagcacagatagtgcgaatcctggagatggggttaatgtttgggtaacagataatggcgatatcatggctttttcccacaataatgtcctaacagatatcaccttccgactaagagggggcgatgccaaccaccagtctactggcgccatttccaaatcagatacaccaaaaacagctctcgagcgtctcggaaaaccctatgccattatgcgttctgaacgttggaccagctatgtctataaagatagtaacggggacgaatctaacttctctacacaaggagaccagatcgttaatgttatgtctgctgcagaaaccaagcgcttaaaaggcatcacaggtctggataaaaatcaataacgatccatacaaagaggctaggacaaaagtcctagcctctcaattgtctttggattgtcgagcaagacgcagtggttgagtgctcaaagcactgcttcgaggtggcggatagaacttgcgaagcaagtatcctaagtctttgttcgctttttaagcttcaaagatgccctatgttgacggaaactatgtttcctttatctgcaaccttcaacattctcccagactgttgaagctgtcccactctctctttcttacaattcagcaatttggttcaaattcacttctgcaaccgtatcgttaccgaacatagaaatgaccattttgaccttgttgttatcaatttcagtgatcttaccagtatagtctgtgaaggcaccgtcgatgatacgaactgtatcgcctaccttgacatccaaatcaaactcttgaacagtttgacccatagagagcaagatactgcggatttcttcttccaacaatggagttggttttgaacggttcccgtgtgatccaacgaaaccagtaacgttcggtgtattccgaacaacaaaccaagcttcatctgtcatgaccatttctaccaagacataacctgggaagcggttttcttcgatttcttttgttttaccgtttttctcaacttgtacggtttgagttggaatctctacgcgcaagatgttttctaacatattataagtttgcgcacgttgcaaaagattctcttttaccttgttttcatatcctgagtaggtttgtagtacaaaccagcctttatcaaaactgtccatttgggcatcctttctttctgtttagcctgctcgagcttttgtgaacatactaaaaaaagcctcttggctttccttttcctagcttcattataccacattttgccagaatgcaaagaggtttgctgatttatttttaagaaaagaccataaaaagcaggacccttgggatcccgcctggcttcttttcttaaaagaaattgatcatgtgcaataggccacgtgcaatgactttgtcaaacaaataaatcaatgcaacaaagaaagcggtgtactcaatcactgagataaagtttttccatctttccttgcgatttggccaagttgtatcttttagtaagacgaaaatatctttaatgaatttcacaactctctcctatcgtgtttctttatggatggtatacttgctgcaatgtttgcagaatttattgacttctagacgtgttggttttggcgtcccactcaacttaatggagtaattgcgtgacccacaaaccgtacacgctagacttgctttttttaatgccataacgcctccgttcaccccattatagcaagttttccacgttttgacaaggacagaaaatctactgttaataaaaaagcaaatctaaagcgttatcactctagttttttcctcatttttggtaaaataaaacaaaaggagacgaatatgaaaagtgataacttaaaagaaagtagaaatatcgaagaccgtcgagggcaaagctactcccagtcttcaggcaacagtaaccttggcgggggcattttacaaattttgctatcgcctggtagcttcaagagtaagatcatcatcatccttgtcatggtccttctaggagggggagctagccttgggggcctctttggaaatgggacttcacaaccttaccagtccacccaagtcacgcgcaccaataagacccatgtcgacgatgcagatgcccagttcgtcagcaaagtccttgggacaacagaagatcattggcacaaggtctttcaagcagaaggacggacctaccaggagcccaaactagtcttctataccggacggacaaagacaggctgtggggttgggcaagcatcggctgggcccttctactgtccaaccgataagaaaatttatttggatatgagtttctacaaggaattgaccaccaaatacaaggctagtggcgactttgccatggcctacgtcatcgcccatgaagtcggccaccacgtacaaaatgagctgggaatccttggcaaataccaccgtatgcagcaaggactttctgaaaaggaacgaaatgccatcagcgtccgcatcgagctgcaagcagattacctagcaggtgtctgggcccgctccattcaagaccggaaccttttggatatcggtgatatcgaagaagctatgaatgcggcccatgcagtcggtgacgacactctccaggagcaagcattcggctactcggtgccagatagctttacccacgggacttcggagcaacgcatgcgctggttcaaacggggctaccagtacggagatctccaacacggcgatacctttagcttgtcagatagtgaactttaaacaaagatctattcagaaatacttctgaatagatcttttagaatatagacaaattgcattttacataaaacaacctaagtgacgttggaaaattaaaataattaatactattaggatcatttcaacagaaactttccgccgtgagaaaagtgctagaaataggattgtttctagcactcgggagttttggaaccttaggtccaaaactaagtcatggaacttcttcgaagttcgctgacgtccgtactcacctaaggaaagttgctaagatgactttatcttcaatctgcaaaaaacgattcagaagaatttctgaatcgtttttttgattagaaaccaagccaacctttgaaagtatcccaagcgtttttcgcttttcctgggatatcggcctcgtcgattgcttttttcgcatcatcgaccatattcgacgccttttctttgacatcctcaaagaaacctttgtcttctttgctgtctgtttctgtcgtttcttctccgactggcgcaatgccattttcagcataagagttcttcaccgaatcaaactgggtaccgtctgtataaggcaggacactgttagcaacattacggaagatctctgacgccgttccggcactactatcggtcaggtaatgaccttcatcggtcgttgggaaaccaagccattgactgatgaccacatctggcgtgtagccgatcacccattggtctccagagaggtccttgttaaagctggtctctgtcgtaccggttttcccagccatggtatagccataaggcgcagcgttgacccctgtaccattactgaaggttcccagcatcatattggtcatcttatccgttgtggatccactaagcacccgggttgatttctgactgtgactcttgaccacttggccactggcattttcgatcttggtaatgaggtgggcatcattcatgaccccgccattggcaaaggttccataggcttgggccatctgcatcggattggttgtcacaccagctcccaaggcaacagcaagcgacttatccaccttatccatgttgagaccgaatttttttccgtactcaaagacagtattgaggcccaattcattagcggtcgccactgctggaaggttgagggattctgccaaggcctggtacatcggtaccgttgggctcgactggattcctgcatagttattgacttcataacttccgtattgggtggtactattatccagttccttattggtcgaccaaccttctgcaacagctggactatagaccaccaaaggcttgatggtcgatcccggactacgggcagcctgggtggcatagttgtaagtacggaaacctggattttgatcgcttccgacgcgtcctacgagagcccgaacccccccggtcttaggatcaagggccacactaccggactctgcgcgcgtgccgtcttccgctaccgggaagagggctgtattgtcatagattacctgcatgcttgcttggtaattttgatccagctcggtgtagatccggtagccatttttgacaatatcttcttcggtgagaccgtattcgttgaccgcttcattgatgaccgcatcaaaataggatgggtagcggtagtcctctgacttgccttcataggcatcgactagctggccatagatatcaacagcagcagattgatcggctgttgcctggtcaatatagccagccgctaccatattttgaaggaccgtattgcggcggttggtcgcattctctactgaatagagcgggttatagatctccggtcccttgagcatgcctgcgagaaccgctgactgatctagacttaattgactggctgaaaccccaaaatactttttggaagcatcctcaatcccccaaaccccatttccaaaataggcattgttgaggtacatggtgaggatctcttttttactgtatttcttattgatttcaagtgccaggaagaattccttggccttgcgctccaccgtctggtcttgggacagataagcatttttagctagctgctgggtgatggtcgacccaccacctgagcgacccaaagtcaaaatggctaagaagaagcgaccatagttgatcccactattcttgtaaaagctccggtcctctgttgcgaccacggcattttgcagattctcactaatggcatcgagttcgacgtaggttcctttttgtccggtcaaacttccagcctggtccccattcttatcatagataatggtcgtggccttcagtgcattctgcaaatccttgacgttggtcgtctttgcgagatagaagagatagccccctgtcaagagactaaagcctagtccaatgatcaggagaatcttggtcaaatggaatcggcgccaaaaacgacggaaggggtgctgagagagaggcttgcttctgtgcttgcccgagcggctataggtcggctctactgtctcttccggtagttccgtatctggcacttcttctgccaccgatttaggcggatgatcctttctaaaaaaagtgatcaggttttcaaataattcttttattctattcatacctgttattgtaacaccttatccttgtcctagcaagaaaagatagctcctcgctatttctcatttagttttctttaagcttagattttgctacaatagggtcatgaactatcaatttaccattccacaatcccttccccaaatgactgtaaaagagctccttgaagactacttcctcatcccccgtaagatccggcattttttacgggtcaaaaaacacgtcttggtgaatggagagaccatcaactggcagagccccgttcaaaaaggagaccagatccagctgatctttgacgcagacgattaccctgaaaaagagctcctagaaggagaccccagtctcgtcgaagaactctatcaggacgagcacgtcatcatcgtcaataagcccgaaggcatgaaaacccatgccaacgaaccgatggaaattgctcttctcaaccatgtttccagctatgttggatccacctgctacgtcgtgcaccggttagataaggaaaccagcggagcgattttatttgccaagaatccttttatcttgcctattctcaaccgaattttggaagataaaaaaatccaacgcgagtactgggccttgatccaaggaagtttagcgcaaaaggccatcatctacaaggataaaatcggacgtgatcgccacgatcggcgcaagcgcctggtcgatccacgcaaggggcagtacgcagaaacccaggtaacacaactgaaaaaaatcgggcgaaacagcctggtcaaatgccagctcaagacgggccgtacccatcagatccgcgttcatctctcccatcatgggcacccgattgtcggggatcctctctataaccctgaacgcggggagcgactcatgctccatgcccatcgtttgaccttcaccaatccattaacgcttgaaaccatacaagttgaggcgccttccaagagttttgaagaagggttgagaaaatgagaaaagaaccgaaatagtcttcttagagactttccttaagtgagtacggacgtcagcgaacttcaaagaagttccatgacttagttttgagccccttcgctctttaatttctaggctcaggctaaaacagtttcccaaactgttttactctcaaaactcccgagtgcttgaaattctaatatttcaagcacttttctcactgcgtaaagtctccagtcataatcgaataattcaaaagataaaaattatttaaaacaattgacagaatctctcattttattttaaaaaaatttatctgcataataaaaaagaagcctgtggcttcttttttattattgatagcgaggagttgcaaatccacgaatattgccatgtccaatccgatacgtattgcgacggacttggttgttggagtttccttcaatggtatgaataatcccatttgagacgctctcaacaattccgatgtgatccgcaaaaccattattttgctggctattttgatcccagttaaaggtgatgatgtcccctgcttttggtgtagtggtcccatcttcattccaaatgcccaaacgtttgaaaatctgaatatgacgttcaaccccacattcacgaccaatcaaaccactcaagccctcacgttggaagaccgttgtgacaaagatatcacaccaatcatcggtcgtcttcactgcataacctacaggaagtggtttgacactgttgtaatcattgaccaattgatggtgagctgcagttccgccacgaacaccaactaaactagctgctgcccgtaagacacggtcccgttgcccattcgttacacgaggactaaaagcagtttgatctactgtcgcacgaggatgaagggctgtttgaccgaggttaaagccttcaacgccgccatcgacatagtccacatagacgtgggtggtatagttgcctgattggtactggtgatttactgcagaaacctgcacttctgtgtgcataccagaaggtgccgttgaataccagtagagattttcttggtgcgcttgagaccaggctgcaacacggatgttcttaatccgacgtccctgaggcgcttgatccaccgttaccgtaaaggttccagcaccagaattaacattcttgatccctgtttgtgtctttgtcttagcatttcggaattcgacttctgtagtcgttgttccaacacccacacgagagccatcattttggatgtagtagaggtggatatggtacttaccagtagagttcttgtgatcgctggctttaacagataccttgtagtctccgttcgcttgacgagttgcttcataccagcggatatcgtcttggccgtccttatccgaccaagttgggacttgcacagttcgcacacctttaggattgtagacatccttaatgatgacgtcaaaggtacctgtatccttgttgttgttttggattaagattgtaccagaacggcgggcttgacgcacctctgtcgtggtttctgtgatgtaattccgttgattagtttgatctacataataaacatggacattgtacttaccatcctcatttttatggtctgaggctttgatggttgctcggtagctgccatcactttgacggactgctttgtgccatactagatcatcctgccagttcttgtctgaccaagttggaaccaagacttctttcaagccatttggagctactatattgcgaattactgcatcaaacgtgcgtgtttcagcattattattttcaattgttaaagtaccacttggttttacgtggtgtacttctgtcgtagtctctgtgatgtagttccgtttgtcagcttgatccacataataaacatggacattgtatttaccatcctcatttttatggtctgaggctttgatggttgctcggtagctgccatcactttgacggactgctttgtgccatactagatcatcttgccagttcttgtcggaccaagttgggatcaagacttccttcaagccatttggagctactacattgcgaattactgcatcaaatgtgcccgtctcgacattattattttcaatcgttaaagtaccacttggttttacgtggtgtacttctgtcgtagtctctgtgatgtagttccgtttgtcagcttgatccacataataaacatggacattgtatttaccatcctcatttttatggtctgaggctttgatggttgctcggtagctgccatcactttgacggactgctttgtgccatactagatcgtcttgccagttcttgtccgaccaggttggaaccaagacttctttcaaaccatttggagctactacattgcgaataactgcatcaaaggtacccgtctcaacattattattttcaattgttaaagtaccacttggtttttctactttctcaaccggcaaactattatcttctgattctaccactcgtgcgcgtgcgccatatggagcgcgactagctaccacagctggtgctggatgctctgttgcacccttctcgctagtgacctgctcagaaaacggggtatcactaatagttggtgtgataggtgctgtctctgttagaacggtattttctgtctgaacacctttctcaactcccactccttcgttcacagtattctgcgcttctgatgaagttgttgtttttgcaacgacagctgatgtattttctggtgtttgatcggacgcctgttgctcatcggctttgacttgttgtgtcgaaaaagctaacaaaacagctgtcccagcataaaaaataagatctttctttttcatatatcttcccttacaatttttttacggattgtacccacatagtagtattatagcacaaaccgccggatcaagaaacaatatcattagaagattttatcctgtttttaaagaaaacagaaggccaatttggccttctgatcagcttatgcaaaaatagagaagaaaggtgctccaagcttgttatccatcggatccttactcttaatggagtgaagataattgatggagtaccagccgttgttgccgctattatatggatcgcgtacataggttctaccattatcatagccatgcaagaccaactcatgggtataaggatcgctagtaaattggctattgcctaccgcagcaagtacatgcttgccagccatgagggcttctgcaatgcctccagctccgttaaccaattgactcttcaagccccagttacgagtggcagctacaatcccatcagaatctgttcctgcttcacctttgttaaatgaatcagtattgttgtagagataatcagctactgttgttggcaaaatcgttctgccaaggatatctgtgaaggtcatggcaagagaggttggcacacaacctgactgatcgacattgctcacaccataccatttcccagcccaacgaggatcacgttgagaataataggttgtttgtggattcaccttttgatttcgtggagacaaagccgtctgaccgaggttaaaaccttcaacgccaccatcgacataatctacatagacgtgagtggtatagttgcccgcttcattaccgtgattattggcagagactgtgatctctgtgtgcatacctgttggggttgcggaataccagtaaagattttcttgatgagctttagaccaagctgcgacacgaatattcttaatctgacgaccttgaggcgcttgatctacagctactgtataagtcccattcgttgcattgacattcttaatggcagcctgtgtcttggtcatggcatttcggaattccacttctgtagtcgtggtaccaacacctacacgagaaccatcattttggatgtaataaaggtgaacatggtattttccagttgagttcttgtgatcactcgctttgacagataccttatagtctccgttcgcttgacgagttgcttcgtaccagcggagatcatcctgtccgtccttatcagaccaagttgggacttgcacagtccgtactcctttaggactgtagacatccttgatgatgacgtcaaaagtacctgtatctttgttattattttggattaggatcgtaccagaacggcgggcttgacgcacttctgtcgtagtttctgtaatatagcttcgttgattattttgatctacataataaacatggacatggtacttaccatcctcatttttatgatctgtggctttgatggttgctcggtagctgccgtcactttgacgaactgctttgtgccatactagatcatcttgccaattcttgtctgaccaggtcggaaccaagacttctttcaagccatttggagctactacattgcgaataacagcgtcaaacgtaccgttctccgtattgttattttcaatcgttagcgtgccgcttggtttttcgtggtgtacttctgtagtggtttctgtaatgtagtttcgttggttagtttgatccacatagtagacatggacatggtacttaccatcttcatttttatgatcgtttgctttaatagttgctcggtagctgccatcactttgacggactgctttgtgccatactagatcatcctgccagttcttgtctgaccaagttggaaccaagacttctttcaagccatttggagctactatattgcgaattactgcatcaaacgtgcctgtttcaacattattattttcaattgttaaagtaccacttggttttacgtggtgtacttctgtcgtagtctctgtgatgtagttccgtttgtcagcttgatccacataataaacatggacattgtatttaccatcctcatttttatggtctgaggctttgatggttgctcggtagctgccatcactttgacggactgctttgtgccatactagatcatcttgccagttcttgtcggaccaagttgggatcaagacttccttcaagccatttggagctactacattgcgaattactgcatcaaatgtgcccgtctcgacattattattttcaatcgttaaagtaccacttggtttttcgtggtgtacttctgtagtggtttctgtgatatatgtcgtagtctctgtgatgtagttccgtttgtcagcttgatccacataataaacatggacattgtatttaccatcctcatttttatggtctgaggctttgatggttgctcggtagctgccatcactttgacggactgctttgtgccatactagatcatcctgccagttcttgtctgaccaagttggaaccaagacttctttcaagccatttggagctactatattgcgaattactgcatcaaacgtgcgtgtttcagcattattattttcaattgttaaagtaccacttggttttacgtggtgtacttctgtcgtagtctctgtgatgtagttccgtttgtcagcttgatccacataataaacatggacattgtatttaccatcctcatttttatggtctgaggctttgatggttgctcggtagctgccatcactttgacggactgctttgtgccatactagatcatcctgccagttcttgtcggaccaagttggaaccaagacttctttcaagccatttggagctactacattgcgaattactgcatcaaacgtgcctgtttcaacattattattttcaattgttaaagtgccacttggctttaaatcctctggacgtttcccaatataaacatttgtcgttgttctacccacacctgtcaattgcccattgttctgaacatagtaaaggtgaacattgtaaaggccggttgagtttttatgatccgctgcttttacattgacggtataggtcccatttgcttgacgattggctgtataccaaacaaggtcatcttgaccacctgtttctgaccagatcggtacagaaacggttcgaactccatttggtgccttaacatttgagatgacaacgtcaaagcggcccgtcatggtatcgttattgacaatgtcaatcttcccactcaagctgccttctgttgggtccgctgcaggttttgcgttcgctgtgaagcgaccggtatagtccacactgtggtcaaagaggtgtttccctggaagcaattccgcttgagaagtgaactgccaggcgccagctttcccattgtaacgcaagcttttcgcatcgtttacagacagttttggagaagggtattgagcaacccagaaattctgaagcccaaattgagcggtgttaacaggacctttcttgcgaaggttgttttcatccaaccagctagcactggtgtagaacatcaagttggtgtagccatttttgcgcatttcgtcagcccaagcttgggtgttgcggttaatgtttggctgcatcttggcatcctcaaagtcattgaccatgagggtattctttggcaaactcaaacgttgtgcagctgcaatgtagaatcgcgcttctgcacgcgctgcttcctcagaagtatagcgtgagaagtggtaggtcgatacttgcagacccgcagcttgtgcattacgaatttggttctccgcattcgggttcttgtaccaagtgtcttctgtcaatttgacaacgacaccgcccacgcctttattagctagggtacggtagtctccaatactaatgtctccgttatggctactcacatcaacgaatgattttggctgaaccgccacatctgttgaacgaccagctggagcgtgagcgcctgtgttaaagaaggtcgtgcttcctgtattagacggaagaggagtttcttctttctcagtcgtcgatgcttctgtagctttctctacagatggaaccccactttctgaagccgcggccttgttcacaggtgctacaggctgttcggtcacatttgctggtgctgcatagttgcttgcgacaggtgctaccgacttttcagcaacggctacttctggcgctttttcagcttggacttggttgccttcagtagtagcggcctcgtttgaaaccagctcatctgcactgactccctgagcagatacagccatcaagactgccgctccggcataaaaaataagatctttctttttcatataaacttccctttatacaaattttatacgttaatcattttaccacacggtttcagcgatgaaaagttttataaggcaaatttttaaaattagtgatatttttttgaaaaactaaaaaaagaagtctgtctgacttcttttgctattaaactatttttcatatcccaaataaattatttactacaatcggtagttgtcaaaaatttaattagaaaaagaattatacctgatctaaatcctgtttcatcactgaaatcattctttttgcaactgtgtcccacgaatattctgctttataataatcttgtttcatctgaacatttctaaagaagctttcatcttttattagattatacattttatcagctaaaacccgtgggttttcctcttcagcaggtattaataatcctgtttcattattttgaattagatttggcatttccattaaattacgtccaatacatggtaaaccatagcaaagagcttcaacaaacacaattccaaatgcttcaaatcgagaaggtaaaacaaatacatcacaaagattataataatattgcaccttatcagctggtagattccctaaaaaataaacattcggattgttaaattccatcggtgcatctgagggacctataatgtacaactctgcctctggcatgagattattttgcaaataaacaaaagcattataaacaagatttccacctttacgcaaaaaatctttgccaataaataaaaatttatttcgtcccttatgtgagtgctcaagtaataggttgtccatatttgttcccgctcccacgtaatgaactttttcaactggaagcccttgttgagctattaggtaatctgaaaaccatttactcatagtaaatattccagtggcttgattataaaatgtttcctgttttctcattcgactatctagaatatctgccgagacgttttgaaaaccactatatttgaatgattgactattgttttgagaactctctatcaaataatgaagattcaagtcttgatagatatacactggattatcaggaaaagataaaggaaactcatcaaatgtaagacaaacatcctttggagagagatgaacttgattttcagcatattttatatacgtcatgttcatatcagattttctaatacctaaacgaacaagcactttgtgcacattcattctaaaagtataaaaaatattctgttcctcaacaatctcgtattttcctaaatactttttaatattagttattgtaccagaccaatcccaggtcaattgttctttgttatgaataattcttggaattacaatcttcaaactaacccctcctaaatttatgtttagctatatctaaaatatgatctaacaatggattttttaaaagtttgagctctaataaatagatgattaagcttactaaagtaatgctaaaaattaaaagaagtgaattagttacgaataacttaaacccaaaaccaatgactattattgaaaagaaacctagtaaagcttgaactaagttctgtctccatagtacaaaattaatgtacttcccgctttctcttacaaccagaaagttatataaaacaataaaaaattctgatgcaatcgttgctactgcagcaccattctgataaaatactggaattaaaagaagactaattccgatatttacaacaattccatatagagctcctgttaagtttacagtttcacgtccgataggtatattaagcccataagttaatatcccaccaaatatggctccaattaaactaattgctagtaactgtaatgttaaagtggcatcgataaattttattccacctaaaaataaaataatttccctagataggacaataagacctgcactcattggaattaagattagagttaccactgaaagtatttgagtataactttttttaaattcgtcaattttctgttctccaaacaaatgtgacaacctaggtattgtaacagaatagattgaagctaataaattttttaatattgtatatactctggctgcaacagcatacaatccaacgtaatatgctcctttaaaccactctaatattagcatatcagaattagcatagatactaattactagaccaccagaaaacaagacaataattggcttaaaatgctttactagatcaagtctccaaacaagagagagttttaaatactttctacaatagattaaatttaaaatacaagatatccctgaaccaattactgagataaatgtatatagatataaatcactagctgttttaacaagaacaaacatcaatatcaacgataaaatttgtataatgatacttctaatcgtaatataaaggaaatcctcaaaaagaacgtttatccagtccactccgagtgttgtaaaaacaattgtcaaactttgaataaaaatcagaatttgatattctctattcggaataaataagcatacaactaatactaacaacagataggatactatcgtcgataaaatatttatagtaaaaatttgattacctaaatgacttaatttcttagaatcagatctaatacgccccccttccctaatagcataagtagagatcccaagtgcagcaactaaagaaaagtaacctacaatagaagctgtataattaatttttcctaggttctccacacctaatattctactgatatagggataagtgattaaagggaatataattgaaagtgctgttttaaataaatttaaagccgcattcactcccatttttttagtcatctattaactctccatctctgtttaattttgcagattcattattgataataactagtgtcaacgttaacgcaataatccgaggtctatcaatatatgacatgattggaaggctcatcagaaaactaatcagtaggcctgttattaatacgttggaactaagtttctttacccacgtcataattaaatttatagtcaaaaggatataccatacaaaccctggcacccccaaagaacctaatgttccaaatatcccgatatcatcataattaaaaaatccatcaggcccttttataaaataatataaagaagtgcccttttccggagtatgcaatcctaaaccaaatggataagtaaaaattttattaaaataatattctattgcacctgttcgagcaaaagaggagccggtgttatccgaaatactatcagatattgaaccaaatttatttgaaataatgaataaacccgccgtccctaaaataagagtccataataatgaggatagagttagtctacgcttattgtatatgaaatacattgaaagaatgactattagtacagtcaccaaatagtatctcgactgatcaacataaaaaatagcaactaacatcaataataaactaactatatcaaaaaatgattttttaaaatgatttgcaataattttccatgccaccaatataacaaatacccgaacaagtccctcaaaaacactataaatacgtaaaggtactgttaaattataaatataacttataggaataatctcttcaattttcaaaaacaatgtttgcaagccatgatatctgtatacttgcataacaaataatattgatactattgaaatggttatctgaccgattttaacaaaaagcttatagtttctttctgtcttaaatatctcgcaaagaggaaaataaaggagtaaaattgaataaggaagaacatcccacaatacttgcgtaatcgagtaatcaaataaatacattgacacaagcgaattaaaaaacagaattagaaaaaagattaggatataatttccaaaaatacctagtttaagtttccctttattatagataaagtatgccaaaaataatattaaagaatagaatgcaactcctaatttattactggccgctcctcccagtaaattcggccaacttactagataaaaacctctgaattcaatcaagaaaaatagtaaaaatagaaaaagatatttattaaatttcaatgttttttctccttgaaatacgtaccatccaatatttttttcaatcgatatatctttttacataagaagtaggacatatcagatattttcaaagaaagtttagatgcccctctatattctctgtaatagtatttttttgatacacggccaattttctctgactcaggattatgcgctcctctatgataatgataaattgtccattcaggatagaaataagtcatgtatcccttattcctcattctttcacttaaaatcatttcttcacaatagagaaaaatattttcatcaaatcctgatactgcttcaaaagcatttctagaaacaaacataaagctaccactaacccatccagtctcaccctcaggagcagtatagtcaatatcaatccatttatgtatcttactattaaaccactgcctattataatcctgaagtatcatctcttctacaaaattcatccgcttacgaggactttgaatatctccttgaggagtgagaatcttaggaccaactatacctattggatgatcgctcgtttcaatgatagttttacattcattcaactgtaaaccattaggaaactctaaatcattgtttgaaaaaactagatagcgtgtatcaaagttctgaattgcaaattttgcacctaaattattgcctttagagtatccaccattttcattggaatcaattatataaattttcctttgtgaaatttcaaaagaataaacttttttcccattaaaagcagaggaagtaaattcaactttagaatcttgtaagaattgtttccccaattcttccgcactattatctacgataatgtaatgtacatcattcccgacatatatatcaataaacttttttatataatctactgtatcactcattgatttgtaatcagtaataattaatgagtacatagaatctccttttgttttacttcgctaattcctgatagattattcgtaattttctagcgctatcctctatatcaaatccagcttcttttattttttctctagaaccatatggaaggcgttcataactcatagaggtgataaaatctgaccacttttcaacaccatcagataatgataatctataaaagtttgaattaaccgatgctgactctggaacagcagaacttaccacacaaggtagtccagatgcttgtgcttcaatattcacgattccaaatccttcatagaaagaaggtaacaaaaaaacatccattgcttgtaaatattgtgctggttgttcttgttttccaagcaataaaacccttcctaattttatttcttcgtctagcagcgtttctatattagctcgttcttcaccatcaccaatccatataaaataaaaattaggtaccttgagaaaaaaagtatgtattaggtcaactataaattcaggatttttttcatatgacattctcccgacagtacctaaaacggtagcctccactggaatatttagattctctcgtaccttttgccttaactcttcattatataaaaagtcattgattacaataccatttttcagtatcgccacatcagacaaatcagtatcgccatacaaataattcgctgcttcaagtgaacaggccaacttataatcaacaagaaacttaattatttttcttgccgttaacatttttaatctgccaacaaaacccttaccacgactagatgaagtagtgtgagcatgaagtactatttttgcacctacaagctttgacagaataatattaaataacccctcgatagcatcatctgcgttaatatgaacaatatcgtacttttctttttttaaaatagagtagatatttcttagcctttttattttacttgatgcttccttaacatgttgaacctgtcccccgttttcttcaattattcgatgaaaactagggttcttcaattttccaatagccaaaaagtcaacttgaaagtcgtctgttaagggacgagtcaagttataggctattacagacctacctcctgctccgaaattgtctgcccccatttgtaaaattttagttttcatctatttactccagtaactaatacattgaatcacaattcaaattgagacttgtcaggataacgattagacaatatcttagaaaatttctccaagtcattttctgtcatcgccatatcatcattgacacaaagtaattttgtcttttttttcgataataatttaggaagctgatcaacagcggtaattgaaattgattttccaaaatttttagtagatggttgaaaattattactttcaatttgccaataacataataaataatgatttatatccgtattatagtctctaaatttatgtttagatgtttgaacaaaaatgtcttcttctacattccataaatgaattagtgtactcttttttattggaactggtgtatgctgattatagtatccagttatcttccatggaaataacaaaatattttttaaaaccaattgaccatatttaaaattgaaaaacttaaacggcgactgtttcaaggcttttttatttgaaaaatgtctatataaaacttctacattattaaaataaactttggaaaaagatgaccacggaaccaaggcttcataaacagccaatagcctcggttgtccgttgacaaaaaaatcatcaggcttaacatcttgaatcaaatacatgtcatcgttaaaaaaaacaaagttctctgataaaccttcaatgcggtgtaaattcaactcaattgcagcagaattaaatgttggtaaatattcctcaggcataaaatcactatgcctaacccattttagtttaggatgatttaaatttaaccattccggtttttgaccattagttataagataaatattatttacccacggtgcatgcttctctaccatccgaaaccaataattgaatgttccataatctctataacggtgcagattatctccatcattatcaacctgcaaactattagacgtatatttatttttttctctaatgaagtcaggatcatttccatcaacccaaagtacaacaaaatcaattttttcttccatgttaaatcacctataaaataattgtttggccggtctaactatataatttttttgttaaaagtccattattccgatacaataaaaaagaagaaagaccaaaaatattatgttacttttctttatcaaataaaatagtccaaacttcatttgccaaacccttgtctaaaaatctcagaatgatttcttaaaacaacatcaaaaaacgttttgtatactgaaggctagttttaatactttaagtctatacagtacatattttaacttatttggttggtctttcatttgagaaagagaaacactattcttaagcaattcttgtttcacttcatcagtaatgtctatatattctttgtctaatttagatttatacaaacttgctagtatgtgaatcaatccatttacataataaagttgtgagatatgcaactcttcttgatttaattgcgaacatacaaaatctgaataaaacatttctttataaaatccaaacatatctctaaactttttttcattccaagactgtgtaatagaatctgggttgtcaattaagtagtgatagtatttttgattagttgcatagaccttcttagccacaagaaacagtttgtaattagtgccaagatcctcatagtatttcccaattggaaactgaatgttatgatcagtgaataatgattttcgatagattttatcattagcaaacccagtaatataacgatgcttcagcatttgcacaaaagcatctttaccttcaaatacttgggtcacttctggttctgaaactatagcatcttcttcacccttcacaaactcacgattaaaagaaataatatcaaactctagagattctagcgcttctgctaacgctataaaggtatctggttcaatccaatcatctgaatcaggaaaataaacatattctcctttggcatgagaaatacctgtgttccgtgcttcagaaagtccaccattttctttatgaataactgagataaagtcataatccttaacatagtcatcacagatttgaggagaatgatcagtactcccgtcatcaacaagtagaatctcatagtccttccattcttgggcaagaacactttcaatgcaacgttttaaatatctttcaacattatatactggaatgacgacagttaatagtggtttcatagattatttacctaattttttattctactctaattcttctcctatctgatctaactgacttacaacattcaatgatatatggtaaatctttaaatcagctcggatataatccttttttcagcgaatttgattatttaatatttcttatacaactccgaaaaattccgaatataactttgtaatgagaatagttctttttggcgtttaacagatgcctttccaaattgttctctcttctcagtgttctcagccaattcttgaatagccttggataattcagaaggttgatttggtgtggcaagaaggccgttttcgccttccttaaccatttcacagacaccaccatgacggtaaccgactacaggtttaccacaagccatcgcttctagtacgactgttggtagtggatctggattggtacttggcaagacaaagatatcaaacatattatagagttcggttgtcttgctataatagtcaattcgcttgatttgtccagctactggtgagtctgatatagccttctccaactcctccacgcgccactcttcaccttcaaatgcacttcctgccaaaaaggctactgcttttggattagcctgtaagattggcgtcacagcttctaggaagtcgccttgacctttccaagcattcactcgaccaaccattccgatcaccaaagcatcctgggcgataccaaactgatcacggaccgcactagcatccatcacctgataaacagcattgtcaacaccattatagatgacttgaacttggtcatcttttacaaaacgagactgcttgacatgattagcaacagcatttgaaactgtcacaatcgtatccgcatagcgccccatcaaaaagttgatgaaatcagagattgcttttggtttgacgataatttcatgcacatgccaaatcaaaggtaatttcaacttacgtttaagataaatcccctcaagtaccgcagtcgtattattgtgaataagagtaatgccattctccttagcatactgagcaatttgtttggagtaacggttataggagccaaagtactcaagaatgccttttggattaaaatatttccggcgcaaaattgggtaatcaataactttaaccttagcaccgacctcttctaaagcacccactaagacaccgtcattgggtaaaataacgtgtgcttcaaaagcatctttatccaaacccttaataagctccaacaaaaccttgtcagcaccatacatttcggcaccagcgtgaagatataaaattttctgcatttctatcctttaaatactttctcgtagtctgtaacaattttttcccaagtaaaggcttcagcaatccgttgacttgatttttgattgagatcttcgattgcttgagtatccatttgttcagcctgatcgatgacatgtgccaattgatctttcttccaatagagcgccccatcttcaccgacttcacggttaaagccaacatccaacaagagattgagcttagtagactcaagagcctcaagaagggatggattggtaccacctacttcatgaccatggaagtaagcaaaggcattctcacggatgtatttgagcaattcttgatcatagaccgtcccgacaaacttcactcgaggatcttgatcaaatccagtatctttacgcaactgttcatagaacttgttttgttctacattggtaattagaacaaaatctttttgggagtttgactgcataaagccacgaatcatggcctcatagttgttttccggtacaaaacgtcccacgacaaggtagtaatctccttcagtaacttgcttatctgcaaaccaagtccgtactttctcgtcttctttactcaggatagacttgcttgtatcggttccataagcaatataggtcgtctgtggctgatacttagcataatccttctgaatataagcttcgatgttcttactatcacaaatcaaaagatcagcatgtttgaccatgagttgctcagaaaacttccaatacttgcggactggaagactccacttggcacgaagccactcatgaccatccggattgaccatcagagttcctccgatagccttgattttcttttttatccttgaaataaagggaccaatccgacaagccaagacataaaagattggtgcctggtccttgttttcctttgcgatttcaatcgccttattaagtgctgcaatatcgtaagcaatggcacgtgcaggaccaatattagggacatcaatgttgtagcaaattgcaccgttatgttcaaaagtatctgcagtaatccctgatttggctgaattctcccgcatacaagctacataatactggatatctttatcttgttggaattctgtcaacttttcaacaaaggtctcaaaaccaccatattttgctggaatccctttggaaccaacgatataaattgattgtgtcatttttctcctaacatggaaaggacgaagtaggcattttcctacttcgctccttcttttctaagtacaaccttcacggtcttgagcaggatctgaatatctctccagatcgtccaaccatccatgtatgcaacgtcgagtttgaccacttcgtcaaaatctgtaatctcactgcgtccgctcacttgccaaaggcctgtaatcccgggcttgaagctgaggcggcgtttttgggctggcgtatagtcttggtattcgtctaccgttggaggacgagttccgactagactcatatcgccgatcagaacattgtaaaattgtggcaattcatccagactggtcttacggataaagcgtccgattggtgttacccgtggatcgttttccatcttaaacatcccaccagtcatggtgttttgcgccatcagatcttttttaatctcttcggcatccacgcgcatagagcggaatttatagaagttaaaataccgtccgttctttccgacccgcttctgtacaaagaaagcaggtccaccatctttgcggattagagggaccaaaacgatactcactagtccacaaatcaagagaccaaagagggcgcctacaacatctaagagacgtttagcaaagacgtgacttggtttatagaaattggttgagaaagtgacgacacttagtcccccgacttctcgaacccgtttattgcccaaggaagcgaagttaaaggcattgagattgaccgatacatcgatccccatactctcaaactccgagacgaaatcactaatattgtagtcctcacttggcagattgataaacacttcatccaccacttccttggtcacaaagttcatcatttgatccggctgcaccacccgtacacccgaatgggtaaaatccgtatcatccatgacagtgacaccaatcagttccccatgatagaggctaggtgaatgcagaatatcaaataccttttccatccgactggtcgctgtgatcaagaaaatctttcgcgaacttttccgtcgtggcgaaacagacttccggtatctcttgagcaagagatccatgatatagacggaaaacgtattgaaaagaaagaagtagatcatcccccgacgagagatggaaaagaccccatcgagcataaaagaggtaaaggtgatcccaacagcgaaaaatacattgtatttcaagacctgaaagagctcatctagatagcctctgctataaaaacgataggcaatattgctaatgtaaaaggatacaaaatgcaagagatagagaatggcaattgtctgcgacgtgtattctgcatccttaaaaagactcacaatgtaagccgaaaataggacagctaaactttgaaagagaacaatatttaatttttccagttcgattctttcttctcccattttccctcgatcctattctttactttttcccgtactctccgtaagatccatatccaccgtatgaaccatactcagcagctttaatgttaaatttattgagcacgactcctaagaaaggggtgcctgtttgttctaattgttccttagccttttggacagccttgcgtccattggcaccagattctgtgatcaagacagttccatcacagcgttgggcgataatggccgcatcaatcacgaccccgattggaggcgtatcgacaatgatgtagtcaaaatgctcacgcaaggcatccatcatcacagtgaagttcttgctttgcaagagacctgttgggtttggcgctacctgtccagactcgatgatatccaaatttggaaaatcagtcgcatacaagatttggtccaattggctacgaccagataagaagtcggtcaagccttggatcttatcccggctacggaaaacccctgtcatgacagagttccggatatcgcagtcgaccaagagggtcttgtaacccgcacgcgcaaaggcaacggccaagttggttgaagtggttgatttcccttcattttcttgaacagatgagatggcgatgacttttaagtccaccccactcaattggatattcgtcgctagggcattgaagtactcttctgccttccgaatttcttgtaatttattttttgaaatttctaacgtattcatgcgatccccagtctacagtttcttaatatctggcacaataccaagcaaggttaagcccatcaactcttcgatatcttctggtctcttgacacgatcgtccaagacttctactacgaccatgagaaccaccatcaaaccagctccagcaataaagccaagaaggacattgcgtcggatatttggtgaagaaggtgattgaggcacttctgcttcatccaaggtcgtaacatctgataccttggtcacagcaatgatcttttcagctgctacattccgaaggccattggcaatacgagccgcttcttttggatttccatccttagccgtgatcgaaaggatacgagtatctgttggaacggatacactgatctttttcgacaactcagcaggtgtcatatcgagtttcaattcttcgatggcttggctcaagacattttgagaaagaatgatttcacggtagtccttaaccaagtaagaaccagcctgcaaatcagagtttgtcaaggcattgttgtcttggttttgacgactgaccacgtagatccggctagtactttggtactctttcttggctaaaaaggcactgtagccaaatgctgcaatggcaaagacaagagcgaccaaaacgatcgaaaacttacgtttccatagagtcttcagcatagcgaaaacatcaatttccactgcttgattttcttgattgttcatttcctaattactccttcatgtggatctctccacctgtttcctggttagattaattcatccgctaacaagagttcttgattgctgacaaagagagcttgtgctcgtcgttctccgtattcttccttgatcaagcgataggcttctgccatataaggcggtcgtttatccacattgtgcatatcactggcaacaaagtgcaccaagtctttttctaagaagtaccgagctcgttttttgagttgtttttgttcatccccaaagaggcgaggcttgagaacactggaactattgatctgcatgtagcagcccatgtcaatcatctcttgcacgcgctcctcatttttctccaagcacttgtagcgctcgatatgggccaccaccggtgtcacacctagatggagcaaacggtccaaggcggtatgaatctccttgtaaggtgttcccatgctgaattcaatcagcgcaaagcgcgtatctgccaaacgtggaatgatcttttcttccagttttttcaagacatcattagtaaagtagatctctgccccgtaatgaatcgttaaatctggcgcgacctctgccgcaatttttttcacttcttgaaaattttcagaaatcttttcttcgggagtttcaaacattcccttgcgacgatgagaagtggagataatggtccgtaccccttggcgatagctttcttccaataaggcacgcgtatcttctcttgtctttggtccatcatccacatcaaagacgatgtgcgagtggatatcaatcatttttcttttccttccattactttttgaatggtttccttagccttggtcaagctggcttgatccaactccatgacatagaggttgtaaccaggcatagcataagacggcaagtcatttcgtccttgaccggtgatcgcttgagaagtcacctcataagaaccacccgtttctaactgggtattgatcaagttcatcatagtcggcaactgcatattggtttggacagaatcttggaggtttccgataatctcattgtagttgcttaagaccttggtagaggtcaactttttgataatggccgcaatgactttttcttggtttttcccacggtcattgtcgccaccttgaagagagtagcgttctcggacaaaaccgagggcttgctctgaattcaaatgaacctttccaactgggaaatggaacttgccatgaagactcgtgaattcttggtcattttccacatcgattccccctagaaggtcaatcaacttgaggaaggaggtgaaattgagacgaacataatagttgagcttgatatcatagagattctcaagagtatggatcgaagcatccactccgtagatccccgcgtgggtcaacttatcattttggttgttaccaccatctgcaatcggtacataggcatcccgtggtgtcgttgtcaataggacttgcttggtcttccgattgacggtcatgatgatattgacatctgaacgagaaaccgaggttaccggcccataggtatcgatcccgctgacatagatgttaaagacatccgcattggcagataccttgctcgtcgctgccacttcttttcggatcttgtaggaatagattttcttcaacttcttcgcatagtcggcatcttcagcagcgatagtatcttcaaaggtactgttgagcaccatggcagaagcattcccttcttgcaggctcttataggcatctagataagtcggtgcatccactacagaaatttcctgacccttggtctttttgatattgtccaagaggaccgtgagattggcttcattattgttgccctttggtgccaccacttccttgatttctttgatgtctttgatgtcactgtctttcttgacatagacagccatctcaaactctgtatagttagagtggccattgacattactcgtcagatttagcagctgttgactagcaaacaaaactcctgaactagccaataagccgacaagaagcaggaccaaagttgtctttttggcctgatttttgatcacaaaccaagctgacaagagcaagagaacagctagtagtaccatcacgagaacattaacatagcgaaaagccaagatgttattggccaacatggtataggtcgcccaactcgcggtcataagcaaaaaaataagcaatacggaattaacgattcgcaattgcccccacttatgctctgaacgacgactccgtctcttttgtgacataaatacctccaattagtcctaattatatttattgtaacatatttttagcaaaaaatgcattaattatcacttttttgtccattatggacacttggaaagtaagcgctttctgaaacaagcaaaatcccttgtatacttatgcagagaatccaaaaaaccgggtgaaacacccggtttttgaagatcctacaaaagatcatcccgcttgacttgctcaaaactttccttgccatcattgagcttgtcccagatgacaacctttccttctttcaatgatttttgaacatcaataatccgctggttggaagacccacggaactgcaacatgaggttgcgtttgcttttatcatagcgtccatcgaccaggatatcaatcagcgacaagagctccagtttatcaggcgtttctaacatcatttcttcccaagtgtagcctgtccatgaccagatgtctttttccggcaattctttccgaatacgttttacaaggggtaaaagaatacctgtattaagaaatggctctcctcctagcaaggttaagccttgaacatagggttgggccagatcggccatgatctgctcttctaactccttggtatagggaataccagcattgaaagaccaggtcgctacattgtaacaaccctcacagtgaaacatacagccagccacataaagggagttgcgcactccttcgccatcgacaaagttaaaagccttgtaatcgatgattcgccctttactcagctcctcactcttccactctcctggttttggtgtattccatgtcatccttctagtccacctctatccaataccgctccgttccattacgaacatcttcaaattgaccgccattagctaaaataacagctcggctggcaggattttccgtgctacaagtcaccagagcacgatgaatgttcttttctttagccacttgcagaccttgatgaagagcttcttttgcatagcccttgcccctttcagagggacggatggagtagccaatgtggccaccctcctccaggagatatgcactcaggcgcaagcggagattgagaaagccaaccgcttgaccgtctcttgcaaaagcgactaactgaacagcaggaacccaaccttccggaattcctagccccatttccatgtcacgattactttccaaccaggcttcgtaaacaaaagcttcagcatcccaaaagccgccgtcatgagccgattgggtctcttcgaactctgccaccatgcttagaatggtttctttatctgctaaagttggtctacgtagttccatctttacctccccccatacgagaaaagcgagagcggactctcacttcacaacataaacaatcatttttaataaaatgagttaataaatactgaatcaataaggtgacgcttatttattaaactttttttagaatcccgtgggaaaaatgcctgaaactaacaagtttcaggcatccggaattattgagaccctaggctcaataattagtcatggaacttcttcgaagttcgctgacgtccgtacccacccaaggaaagtctcaaaagagaatttcatcttcaatatgaagcgagaactctcacttttattttttcttagccttttttagaaattgttctctcaggctggctactcggtcttttttattgactccacctgttgaatgcttctcgtggaatcgttgcacctgagccttgcccttatcatctaattggtattttcccataatgtcctcttctagtctgtcacttcatgtccaccatacttgatggtagacccgttcatgtgtttgacacgcgccgcgatttccttgtgacggccattgaccatcggacgagcttgagggtttcctagataaccacaggtccgtttgaccacatcgaccgttttcggatcgctattgccacagtttggacaagcaaatccgcgctcagtcggcgtgaaatctccttcaaaatcacacttgtaacaacggtcaatcggcgtattagtcccgagataaccgacccggtcataggcataatcccaaaccgcttcaagggctttgggattttgttggagcacagggtattcacaatagtggataaagccaccagaagcccctgcttcaggataaattttttcaaaatccaacttctcaaatggggttgggttcttacgaacatcgtagtggaaactattggtgtaatattccttgtctgtgatatccggaaccttcccaaatttctccgtatccaggcgacagaagcggtctgtcaagctttctgacggtgtcgaataaatagagaagtggtaatcatactggtcagaccattcttccacgcgcgctttcatatccttgatgatatcgatcgtgaattgtttggcttctggattgtgttcccaatttggaccataaaagacggttgcaacttcatagagtccgatatagccaagagaaacggttgctctgcgatgacggaagagctgatctacctggtcatatttgcccaagcgtttcccgaaagcgccatattggtagagaatcggtgcattggctggtgtcgcttctttggtgcgttccacccggtaaaccaaggcatcttcagcgatgttcatccgttcattaaagatttgccagaatttctccttgtctccgccagattccaaggcaattcgaggtaaattgaccgtcacgactccaagattcatccggccagaattaacttccacaccattctcgtccttccaaccttgaaggaaagagcgacatcccatgggcaccttgaaggagcctgtcaattctacaatcttgtcataaaagaggacatctggatacatgcgtttcgtagcacattccaaggccaattgcttaatatcatagttaggcgttccaggctctaagttgagtccccgcttgagggtaaagattaattttggaaaaatggctgtccgatgttccgatccaagacccttaatccgaatttccagaatcgccttttggatttcccgttcgaagcgattggttccaaggccaaaaccaagcgaagtgaaaggagtttgcccgtttgaagtaaagagggtattgatctcatattctagcgattgcatggcatcatagatgtctttttgagtcttactccaagcatagtcctcttgcttttcaggaagtacccactctttggcatccgctaagtgtttttggtagttcttttctgcataaggggccaagacttcatcgatccggtctgctgaacagccaccatactgactagaggccacattggcaataatctgcgagatttgtgccgttgcagtttggatagacttaggactttcgacttctgcattcccgattttgaagccatttctgagcatgccttcaaaatcgatcaaacagcagttggtcatcggtgtataagggctatagtccaaatcatggtagtggatgtcccctttttggtgagcattggctacgtgtttgggcaacattttaagaccaatagacttaccaacgatccctgccgtcaagtcccgttgcgtattaaagacatcactgtccttattggcgttttcattgacgacggcttggtccttattgaggagtttgccaattgtaaagttgatatccgtcgcttttgagcgctcaaaatcccgctgggtgcgataagtaatgtagctctctgcaatcgcatattcattagcttgaagcaattcatgctcgacgacattttgaatctcatagatcttcacgccatttggaaaacgttccaaaatctctgcgatcacacgatcgacaatggcttctagtttggcttccatcacgggagtgagagaagtcacttcttctgtcgccttcaacaaggctttataaattttttcaacatcgaatggaacacgacggccatctcgtttttcaacaaaaatatccggggccattctcagtttttcttctctcaaggtgatcataccaaacatgcctctcttcatttatttacatacaagttgtattataccactccaaaaataaaaatcaatatcttgtggtgaaaattctaaaaaactttctaaaacacaagatattgattttcttaagagcgttgatagagtttgaaatgacggtatttcttctcaactagacgataattttctttgagcaagtccttcatattggaggtcaactccacctgattgttgaccacaatatacttaggttcagaccgatcgatttgttggatcacattggtccggttttcattaatccccagataagacgtcggggtcaataaggcagaagcggccaaacgatcgctttcttgatagagagtagctgtcgtatcccaagcataaatggtatccttcgacttggtgtgatttttaatgtagctggcaatagcactccgttcactggattggccagactgaagcacgacatcttgaaccactggattcgccaacagatagacaagggctactagcggtaagaaaacttggctcgtaaagtaagcggcccaaacttccttgtttttcttcttccgaccacggcgttcgatcccatcgttttcttccccatctcgtgagaaccagatcgcaaacaaaggaagaacaaatggcaacatcggtaacaattggtaagctccctgttcaggaagaccaatcgacacaatgaggactaccaggctacctgcccatcccataaagcggaagatccggcgagcactgctattttgcttggtaaaggacatcaaaaaggcagagactaggccaaaggccagcgccaacagtccataataaatggcattactgaaggtctgtccattgctaaaattcaaggcattaaagacataggttacttggttaatggcatagccaaaagtctgatttaaaacggtgatatagccaattggataaaagacgagtgaaaaaccaaggagagctgctagtagttgataaaagccacgcgcccatctcttctgcttgatattaaaggctgttaatccaaggaaggccaacaaataaaacagggcactggtcatcggatcaatcaagaaagccacagcagcaatcgcaccataaaggataaagccttcatccttacgatgcccaatcaaataagccaaaatgaaattcatgctggcaaataggattggaagactaaagagagtcacataagttcctccaaaaccaaggcctagcaccaagaaataaaagagtaactggacattcttcgctgtatctttatcagacaccagcaagcgcacaacccgatagagataggtacccgcaaagaagagggaaatcgcttggaggatcatcaagatccaatgtccaccagctaaacttcccaaccagttgattgcataatagagcagaccattggttccgtaaaaatcaccaaacggtacttgccccttggtcattgcccagccagcatacaagttttgcgattgttgattggttgcaaaacgggttaaaaatggcaccccgacatgcagcaaactaatcaagagactcaacacaaaaggaatcgctagggggactggacgcttagcttgacgacggatcggctcaactgccacatctgcttctagctcttccgtattctcttctaccttcgatgcttccgcttttgtcgcttcaactcccgccttacgcgaacgacgactcatccgactgagcggttgctccgcttcctgttccaattcttgtgtaggttctgctattgcttctggcttggcatcactaatttcctctgatgcctccattgcaaccggctcctccaagacttctgcctgctggctatgagtcggctcttcttcacgaaagactgatttatctagcacctcgcgaatttcacgtgtatcctgaaaactgtctcccacgtgaagccctaactttttcgaagtcatttcttgctctttttcgctcattctttttccttttcttctctattcctctgctttttcctttagaaaaaagcccattatcttctctagtataccaaattctgccgaccatgtcagcctcttgccacatagtcctatggaaaaagagtcagacctctcggtttctgactctttcttctgtattctcacacctattacaacatcggtgcgaacaattgcataatttccttgattaagctttggtgccatgtaaagcggaaggtatcctctgtaatttcttgagacacttcaaagatatagtcaaagtcctcccgaatctttttcaaggcaggcgtccgatacatccagacagcattttcatagtgatggaccaaactgcggtaatcaaagttaatcgaccctacaaccgccatttcatcatcggcaagaacttgcttactgtggacaaaaccaggcgtgtactcatagattttcactccagcatccatcagatccaagtaagccccacgcgtaacaatttggatcaattttttatccggaatatgcggggtcacgatgcgaacatccaccccacgaagggccgcattgcggatatcttctgtcaaatcataatcgatgatcaagtaaggagtcgtgatatagacgtaatccgtcgcttggttgatcatattttgataaaccgtctttccgacctgcgacttgtaaatcggctttggtccactcccatagggaatgtagagtccttctccttcgaccgccttattttcaatatggtagcggtcaaaatcctcgatttccccacggttgatgtaccagttcatgaggaagagtcgcgttaaggccttaacagctcgtccatccaaacgaatggcactgtccttccagtgaccaaaccgctcaatgtggttgatgtactcgtctgccaaattgacaccacccgtatagccgatctgaccatcaatgaccaagatcttacggtggtctcggttgttataagccactgttagacgggggatcaccttgttaaacttatgggcatcaatccccatctttcgcaatcgtttggtatagttcccagccaaggttgccatacagccgatatcgtcataaaggagtttgacttcaaccccatctttcactttctgctctaaaatctctaggatactgttccacatcaagccctcatcaatgatgtaaaactcgatgaagataaattttttcgctgcttttagatcctcaagtaattgctcatacatgtcctcccctaaagggtaaaaggtcgatgccgtcccattatagagatccgcattgtggtccatggataaaatcgacttgaccaagccataaaccgctttgctttcttgcttgagctccttacgcaactgatgactattgtcctctcgaaacttcatggactccatattttccaactggatcatttccttcttggacaaacgtcgctctccaaacatgagatacaagagtgatccaaagacaggaatgacggcaatcaagagccaggtcaccttattttcaggcggggtatttcgattaacaatagccaagattgtcgacacatataagagcccaatgaccgcaacagatagccaatgcgggaaccatctattaagccagaagaaggccgcaaaggatgcccatagttcaaagcccataaacaaaatactaaatccatatttggacattaatagacgtaattttcgaaaggtcacagcatcctccttttttctttctactagtataccaattctttttacccgttgcaacgaccaaccaaaccccttctagacaaacaaaaagagagtgggacagaagtcctagcctctcaattatttttggattgtcgagcaagacgcagtggttgagtgggctctactacgctgattttatcagcttttacagccctactcaactgtgcggaggtgggacgacgaaatcgaattctaacgaattaccgatttctgtcccactctctcttgtttcgtcccttattgcttggttaaaacgataatcccttgatcatcctctgcttgctccagatcttctagcgacaactgattcccttcgatccgatagcgatagggttcatccccgatacgcatggattgattgaccggatcaatactgacctctttggtctcttcttctccatcagcatcttgtaccgtaaacgtgccttttcgccccgtcacaactaagagaatcgtattttcctcgtcctgtcctcgataactgccatctatggacactccttgctctgacttttcactggtcgaagccactgtctcagatgaatgtgagctagcgctacttgaggcttttggcgtttgttcttgctggctacaagcagtcaggaaaagggctactgccaaggtcattatagacatgatttttttcattaagatcggctcctttcgccataaccgtatactatctaccaccagtatacgccaagaaagtctttaggtcaattgtttacccctctaataaaaatgcccttacttctgcaataaaatacaaggaacctgtcacaaataaaacctcatctggatggctctgatccataaactctttgatataggccttgtagtcagccacataaggcaggtcttgtcgatcaccctgcgccaccacttctccgtaatggaaggtcgtcaaaatcaattcagcttctggcaatcccgcttgaagcgtttggagcatcccgctataatcttttcgcttgagggctccaaataaaatcttcacgcgctttcctgctaagctattggcaaactcgatcaagcgcaacatagcatgaggattatgagcgccatccagatacacctggtcgccaaataactctagacggcccggccaccttgtctcttgcaaggcgtgtttgacctgctccatatccacttcttgatctaggccctccatatagaggaaaaaggcctccaaagctactgcagcattttcccgttggtaatcacccttcaaacccagagacggcaagacaagttccacgttttcattccaaaaacgatcctgctctaagccaaaatcgttctggaaggcgtagagatccacatccaattgctcggctctgtcttgacaaacagctgtagcctcagcaggcaaagggcccacaacagccttcttgcccttcttaaagattcctgccttttgctgggcgatttctgcaatcgtccctcccagtgtttcctggtgatccaggccaaccgaagtgatcactgcgatctctcctgtcactacattggtcgtatctagaagcccaccgatgccaacttccaacaagactacatccacagcttgttccttaaaatacaagagggccatgaggcagataatctcaaaataagagagttggtcctgggtttgaagcaaggtctgctccatttgttggacttcttgaccaatccgagtaaaatcttcatctgaaatcggctgatccccaatacaaatccgatcatggatactgatcatatgaggagaggtaaaggtcccaaccttctttccgtgagccatcaataattgacgcagaaaggcgattgtggatcccttcccattggttcctgtcacatgaagaatcggataagccttatctggcctccctaaaaggctcactgcctgctccatacgatccagacccgatcgaaaattcagaccgatccgactattcatccattgctcaatcttattcacatcttcctcctaaaagaaaaaagcgacaaaacctcttctgacgtttgcgctcctttcttttgtagttatttctttctcattttacagcaggtccatcggacttcctgctttttcttgtttcttgaagcagggctaaaaacgtcccccagacttaccaactctttctaatttcttggagttggggtaaaaacatgcactggacttaccaactcttcccaatttcttggagttggggtgatacagtctaccagactgtatcactcctccataaagctgttgaagacttcttcgatcatatcccattctgcatctgagtcttctgggattggttgaaggtcgccttctgttccgtcttcgttttctgtaaatgaataagcttggatttcaacttcgccgttttcatcttcttctgcatttgcagggatcaaaaggacatagttctttccaaattcttctttgccatcaatggtcaaaagaatttcaaacaaggtttcatttccttgttcatccaccaatgtaattaattcacgttcttcatggtcgtggttatgatcatgtgccatactattcttcctcgttttctttctaaaaattgcgatctaaataattttgtaaaataagctgcgctgctaacttatcaataacttttttacgtttgctacggctaatatctgcttgctcaatcaacatccgctctgcagcaactgtcgtcaaccgttcgtcttggtagtcgactggcaacccaaacttttcagcaatcattgcgccataagcctgactggcttccacacgcggtccgcttgtgttgttcatgtttttcggcaagcccacaacaaaacggtctaccttgtattgagccactaattcggccaagcgctccaaaccgaattcttttttgtcttcatcgatttggatgatttcaagaccctgagctgtaaaaccgagaggatcactcacagcaaccccaacggtctttgagccaacatccaatcccataattctcattagaggtctattccttgccctttcaaataataacgtaccaattcttccacgatctcatctcgttcatatttacgaatttggttccgtgcattattataacgaggtacataggcaggatcaccactgagtacgtatcctacgatttgattaattggattgtagcctttttcatccagtgacaagtaaacatctttcaaggtctcgctaatttccttacgatttgaatcatcaagattaaaacgtactgtttcatctgtaaatcccacaagaacaccctctttccttagaatattactattataccataattaagagttttccacaacggccaagcccttgattttacggctttttcaagcatttttgagctattttagctaaactgtttttttatttttgctcactcgctccagcattgatgagattgtccgcaaattgactcggtgtcagcttcaacaactccggtaagtgattgtttttgaagtaagtcatgccttcggctttcttcacatccatcgcttcaaagtcataggtgatggttaccttgtattcattctcattttccaaggtcaaatcagctgtgaaacctggcactgtcaaagcttccttaaaggcatcgtccttgttaaaggattctctcaattgcttttgtgcttcctcgactccaacctgttggatcccttttttcaactcctcatcggttgccgtcacattgatggtctccaactttttaaaggtattccccacataggtgacgatttgcgtttgttgtgtccccttgtcatcttttggaaagacaaaggttctagtgatgactttattttcttcagctttttgcaggatactcttattatccttttgcagttgctctgcttttgcttggattgccttttgttcacttgaatttggcgttttcgcttgttttttttgaccgcatccagtcaaacacaaggcaagtgcacccaataagaagattttccttttcattttccattccttactagttattgttttctaaaatattgtatcatagatttggtaaaatggcgcagtaaactgctttccatttcgatttttaaaaagaaaaaatcagaaacaaattgtttctgattttcaatcgctttaaagagctgcacgcatccgcgcttctgcattttctacatttcgaactgatcgtggcaagaaggcacgaatatcgtcttctttgtagcccacttggagacgtttgtcatctaccaagatcggacttttaagaatacgaggtgtttccatgatgatgtcaatgacttcattgacactcaagtcttcgatgtccactcctagatttttagcgtatcgattttttgaagagacaatacttgccactccattttcagtctttgtaaggatatccaacaattcttctttggtgatcccttccttaccgaggttttgttctttataagttagctggtgagcgttgagccaagtctttgcttttttacagctggtgcaacttgacactgtataaattttaatcatgcatgcactcctttcgctacacgataatactatcgtattaaattataacacaaaaaccatcagtctagcgacctattttgaaaaaaattaatcttcaatttcaatcgcgtcatctaaatctagagttacttcttctacgacaggagctgcttcttcagttttatcaagggttttcactgcttcgtcttcttcgatcaaaccaaaatgaacccgaaccttgtggtcaatttcgtcaaaaatttctgggtggtcagccaagaatttcttagcattttcagatccttgaccaattttttcgccattataggagtaccacgcacccgctttttggatgatatccaaatctgttgcaatcttcaccaattcacctgtacgtgaaattccttccccgtacatgatttcgaccatggcttctttaaacggaggagctaccttgttcttcacaaccttgatcttggtttccttaccaacgttggtatctttttgatccccagtacccttgatttgggtatttccacgaacatctaaacgaaccgaagcatagaatttaagggcacgaccaccaggtgtggtttcagggttcccaaacatgaccccaactttttcacgcaattggttgataaagatggcaatggtcttggtcttattgatagaagctccgagtttgcgcatcgcttggctcatcatccgcgcttgcaaaccaacgtggctatccccgatatcaccatcgatttctgcgcgaggtaccaaggccgcaacagagtcgacaaccaccaaatcaaccgcaccagagtcgatcaatttaccggcaatttcaagcccttgttctcctgagtctggttgagacaagagaagttcgtcgatattaaccccaagagctgctgcataagatggatccaaggcatgctcggcatcgataaaagccgcaatgcccccttctttttgtgcttgcgctactgcatggagggcaacggttgttttacctgatgattctggtccatagatttcgatgatccgaccttttggatatccaccagcacccaaggcaatatcaagagccaatgaaccagagctcatcacttgtactttttgttctgcgcgttcgcccaaacgcatgatggatcctttaccaaaatccttttcgatcaacttcagggcatcattgagcgctttttcacgctcatctccaaatttcttagagatatcatctaattttttctgttttttcgccattcttttctcctattttttactatacaggaaatgcatgcaactcactgacgttttccggtctttgaaaggcacatttcctatccatttttagaattattcttcatttggcacaagcttcattataccaaattttcaccatttaatacagccaagcgcaccaaattaaaggcatgaagaactgcaatttcgcggacatccgcccggctacgtccagcgatattaacttggacactacccactccatttggagtcgcaagtccgataaagacagtccctgctgggtgcccttctagactatctggccccgcaactccggtcaggctaacaccataatcggatcctgttaacttacgggcctgtgaagccatggcttgagctgtaaaatgagacaccactccatgttgctccaactcttgagctggaatagacaacatcttgcttttttcttccagactataggtgacaaaaccacctgcaaagatgctagacgcccctgaaaaatctgccaaagtcgcttggaagaggccagccgtcaggctttctgcagctgtaatggtcttaccagtccgtttcaagagatcaaaggccaccttggccatcgaattgtcatccccataaccgtaaaacaactcttgcaaaggttgatgatccagggtgtggcgtgataagatttccttttctaagacatcgagcttagcatccgctgaagcttgatccttcgcctttgtagatagacgcaaggttacttctcctgtcttggcataaggggcaactgtcggatcactctgctcttcaatgatatctgctaggatcgtaaccagctggctttccccaattccaaagaagcgcaagactcttgaaaagagctgttcccctgttgtcaaatgaggcaccaattgttcattgaccatgggttttaactcacttggtggaccaggtagaacgacataggtcacaccatcgacttcaatcaaacctccaaccgcgagacctgtacggttttgaagggggattgaaccggcaatcaattgtgcttgccgctcattattgggcgtccggacataatcagggcgactggcaaagaaggtgtcgagtttggcaagcgctgttggatcaaaaaccagttctttccctaaaaacttagcaagggtttgcttggtcaaatcatcctctgttggcccaagtccaccacataaaatcaccaaatcactgcgttttgaagctgtctcaatggtcgataagagacgaccttcattgtctcctaccgccacatgataatagacgtcaatccctaaactagccaatttttcagacaagaattgagcattggtgttcacaatttgtcctgttagaatttctgttccaactgcaataatttccgccttcatggtgcctcctacttatactattcgtaattttcatttcattttaacacaatttcctaaattatttaaaaaacagattgaagataaagtaaaaaactcttagaaatactattacatcagcattcctaagagttttaactatgtggcaatcaacttctaaagggctattttctattgttgatagagcttatctatattctgaagcaaccatatcgagcggttgctttttgactactttcttgatctaaaagccttcttctgactctaattcttgttgttccccctcatcttttgtgatacaatagcatcaatttatttctaggaggataatatatgatttctactattggtatcgtaagtttatctagtggggttatcggagaggactttgtcaagcacgaagtggacttgggggtccaacgactcaaagacctcggactcaattctatctttttaccccattcgctaaaaggcttagactttatcaaagaacagcctgaagctcgtgcggaggatttgatgcaagccttttctgatgatagtatcgacatgatcctatgcgccatcggtggagatgatacctatcgtttgttgccctacctttttgaaaatgaccaactagaaaaagttatcaaacaaaagatttttcttggtttctcagatacaaccatgaaccatctcatgttgcataaactaggtgttaaaactttttatggtcaatcctttttagcagacatttgtgaattagacaaagaaatgttgccatatagccgccactactttaaagaattgattgagactggaaaaatctcagaaatccgccctagcgacgtttggtatgaggaacggattgactttagtccaaaggccctgggaacagctcgtatcagtcatgtaaatacaggttttgacttattgcaaggaaatgctcagtttgagggagaaattctcggtggttgccttgaatctctctatgatatctttgacaattctcgatacgcagacagtacggagctctgccaaaagtacaaactcttccctgacttatccgactgggaaggaaagattctcttgctagaaacaagcgaagaaaagcctgaacctgacgacttcaaaaagatgttgcggactttaaaggaaactggtgtattcgaggtcatcagtggactattagtcggaaaacctatggatgaaactttctatgacgactataaggaggctttaatggacaccattgatagcaatatcccaattgtctataatctaaacgttggccatgccacaccaagagcaattgttcccttcggagtccacgcccatgtagatgcaacggagcaagtcattcgctttgactataacaaagaaagctgagatgaatttctcagctttttctatattctctggtgttctagtcatctaacgtcacttatttccacttttccattcacaatcattctcatgatcattgaccaggcctgctgcttgtaggtaggataggaccgcaacgggacccgtaaacttgaaaccacgctttttgaggtctttggcaagttgttcggaaagagctgtcttcgcaggagccaagcggtaatccggaacatcattgttgatggttttcccctcaacaaaagaccagaaataggcatcaaaagagccgaattctgcctggacttgtaaaaaggcctgggcattggcccgtgtcgcaaaaatctttgcacgattgcgaatgatggctggattgtctaacaaagcttccatctcctcatccgtcatgtctgccacatgttgaatgtgatagccatgaaaagcctctcgaaaggcctggcgtttattgagcaccgtctcccaagacaggccagcttgataggtctctaagcaaagcaactcaaagagcgcctggtcatcgtggaggggctgtccccactcctcatcatggtaggctacatatagcgggttgttcattttgacccagctacaacgttttggcatcttattctcctatctttgaaacgtagtcaggcaagggaacagtagacttatccaatagattaatccaacgattaatatctggtggcagagggttaaatttttcatctgtttgataccttgcttgaccatctgtttctataccagttaatgtttcaatctgttctcgaagctggtctacagacatccaatcagtccaaccttcaaataagttttcagtagccaatgttatcccataccattcttgaaaccattcaatgtagtctgcacttaacaggtagagtttttcgaaagaacaagattcatcattcacctttatactatctactatattgtcattatccactatggcaatactcacaccacaaaattcacaagaaattgagcccacttgaccatagcgagatccattatgcaaaaataattctgtctgactctgttgacaatttttacaaaataaaggaaaaactttacagtgtatccatattgtcttaatcttcccattcttaaacattatcttgatatggttgttactgcttcttgcttcaactagtttaattcgagcaatgctcattatttcaccaacatcttcagggcagacttgatatagttctcagcagtatccgtcgttccttcaaagaatttcttgattttcttaagctccgttgccttgtagcccaaagccaacatggcttccatggcttcttcaagagcttggttttcttctgaaactttggcattggactgagccggtgcatcttctagatcaagattgatcttaccttctaggtccaagaccatctgttgggctgttttcttgccgatcttcggaaacttggtcaagtaggtgatattcttgctttcgatggcttggacaaggcctgcattgtcatccgcagcaatgatggccagagctgagactgggccaattccagagactgagatcaagtttaaaaagagctttttctcttcttctgtcgcaaagccatagagcaggtgagcgtcttctcgaactacttgatggagatagacttgcacctcttgattcattttaccagaataggcatagggattggccacatgcaagagatagccgatcccagctgtctccactacgatgtatttagcggtgattttcgttaagattcctttaatgtattcgtacataatcttcctttattgtttatttagtatttgcccaactcccgcaagctggtgtgattttcctgaatgcgtcggaacatcttttccatgtccgacttggtgaagttaaccaagacgggacggccgtggggacagttataagggttgtcacattgggacagttggtagatcagatcccgtgcggagtaatcgtccagtgtgtgattggccttgatggagcgtttgcaagacatcatgatggccaattcagcccggtatttctttatggacacttccttggtcaagaggagcatgtcacacatctcatagatacccgactcgatctcttcttccttcatccagatcggatgctcccgcaagatcaactggttgactccgtactcttctaaatagacgcccacttcctctaggaggtgcttgcgctgttgcaggcgaatcagatcatctgcagggaattcaaagatataaggcaccagcagttgttgctgactaccgtccacatccccgatgctctcccggtattcttcatatttgacccgttcttgggcagcatgctggtcaatgatgtagaggcctccattgccttgagcaaagagataggtcccatgcatctgtccaaaatattccaactctgggaaggtcgatgcttcctctccctccagcttgtcataggccttgtctagactagccagatccaactctgggtgatccagttcatcgtataccgcagcctttctttccgcaaacttgatcgcgcttgtcggtttttctactggattttcttggcttatcgaatcagcagtagcttcatctgttagaggaagttgaggatctgccacctctggccgaagcttgaaatcttgactttcgcggtcataatagaggcggttttcttttaaaggcaaggttgtctgtactggcttttctgttcggcgaatggtcgatttggctagattttctagagcatccggaattaggtcctgctctttcagagcattcgcaatcgcttgggaaatcaaggccatcagttctcgttctttggatatacgcacttcttgcttggtcgggtgaacattgacatccgctaagtaagggtcgatctggatatgaatgaccgcgagcgggaagcgacccaccatgagtttactaccgtagccgtctaaaatagcccgattgagcaagaaattcttgatgtagcgcccgttgataaagagactgatgtagttgcgattggcacgagtcaattcaggcaaagacacaaagcccgtcacttcaaaatccagatcgcgattttcaatggccaccatcttcttggcagacgccaagccatagacgcccgcaatcgcttgccggagattgccagtacctgccgttttggtcatttcttttccatcattgatcaaagtgaaagcaatctctggatgggccaaactcaatcggttgagaatatccacgatatgggacagctctgcctgctggctctttaaatacttgagacgagcaggggtattaaaaaagagatcttctactgtaatcttggtcccgacagggcttgtcgctggctccaattcctcaatttcaccaccctttgcgaccaatttggtcccgtgggcagctccttcttgagccgttagaagggttagaatactaacagaagcaatggaaggcatggcctcgccacgaaaaccaagggttcgaatgcgaaaaagatccgcttgattcttgatcttactggtcgcatgtcgacgaagggccagagcgacctcatcatgcgcaattccttccccattgtctgtgatccgaatcgacttcaatcctgcttcttcgatttcaacgacgatctggctagctccagcatcgatcgagttttcaaccaattcctttaccacactagcaggtcgttcaattacttcacctgccgcaatctggttggctaggacttctggcaattcaataatctgtgacatagctgctcctttaccttttttcaccgatacatgtagctctattataccacagatccacaggactccctttcttaaaaaatagaggccagtcccatcttcttccttaaaaaccgcataggcaaagaaaacgaccacatagacaaatctccttgtcttccctttggaaaaagtgtttaatagtagtgtaaagaaggagccgggctagcaggccaaccgactttacccaaaggagggagaaacgatcttatgaaagttgaagtacacattgattcccacttccaagaagaagcggtgatgatcacagcacctgcactatctgcgcgtgtagagaaaatccgtgactttgtggaagaattgaatcaaaaagggcgcttacgtgccaaaaaggatggggaagcttacctgatcgaaagccaactattccaacgtttttacattgaaaatcggcaagtaattggcgagaccatgacagatcaatttattctgactggaccactctatcagctatctgaagacttgccgacctgctttctcaaaatttcccaatctgaaattatcaacacaaaagaaatcgatcacctgcactttaccagtggaggatcggtgcaaatctatcttaaaaacgggagtctgacctactcctcccgtcgttacttgaaagccattaaggagaaattatcatgctaaaacaatctttttctgacgccctgaaaggcattctcatcgggctcatcctatccattttcttttcctacctcttctcacctgagttgtaccttcccttaagtcccaactctgcagtcggtcgctggatgttcttgcatcatgttcacggctcactggtcatgctctattgtgccctcgtttggggtgcgattggggtcctctttagcttcggaagtctcctctttcaaaaagactggagcctcttacgggctactctgagccattacctactcatgttgcttggctttattcctctagctaccttagccggctggtttccagcacgactcggattttacctctcactcgttgtcgaattcaccctcgtttacgtgatcatctggttggtctcccatcatttttataaaaaacaagttcaagaaatcaatcaaagcattgctaaccactaagcaaaaagatcctcagtgctacgaggatctgaaagtagagataaactgttcctttatacaaatctaataaattctataaaaaatatactcgttatagttgttcaatcatctactgaaactttccgctgtgagaaaagtgcctgaaacacaattgtttcaggcactcggaattattgagaccttaggctcaataattagtcttggaacttcgaagaagttcgctgacgtccgtactcacttaaggaaagtttctaagatgactttgtcttcaataaaagatcctcgctgtcacgaggatcttcttttataatttctttttcaattcggcgactgccatcatgacttccatgggagtcatattgtagagatccagattcttcaattctgtgatcactgtattttctgtttcttcctcaaagagggacatttgttcagcaacctgcgaagacacttcctttttaggagttgcatccgcaagcggtacttgctgggcttgtccttcgagcttggtcaaaatcgcatccgcccgcttcaataattcttctggcaaaccagcgatcttggccacgtgaatcccataagatttatcagctggtccgggttcaatcttgtgcaagaaggtaacctgaccatctcgctccaaggtcgcaacatgaacattttccaaacgggacaaggtctctgagagtgccgtcaactcatggtagtgggttgcaaacaaggttttggcaccggttcgatcgtgaatgtattcgatgatggactgggcgagggccatcccatcataggtcgccgttccccgtcccaactcatcaaataaaatcaaggactgaggcgttgccttgcgaatggcatgattggcctccatcatttccaccataaaggtagactgacccgataccaggtcatcagcagctccgatccgggtataaatcgcatcaaagattggcaattcagccctttgcgctggaacataagagccaatttgggcaagaatcacaatgatcgccaattggcgcatataggtagacttcccgctcatatttggccccgtaatcagctgaatatcccgttcttcatccataaagatgctattaggaatataggactgggctcccatcactttctcaacaaccggatgacgacctttgtcgatcgcgattcgtcgttcttcatgaaagaagggacgattcaactgttgcgactcagcgacactggctaaactttgtaaaacatcaaccgtcgcaatcgcctgagctaactgttgcagacgttggatatacttgccaacttcttcccgaatccgcataaaaatcgtatattccagattagcagacttctcacgcgcctctagcatatctccttcgatgcgtgccaattcctccgtaccaaagcgttctgaatttttcaaggtcgccttgcggaaaaagtgagcaggaacgtgactcaattgagaattggtgacatggaaataatagccatccttcttgttgtaatcgatttttagacctgtaatgccactggcttcgcgctctttggcctcaatctcagcaatccaaccagtaccatcccgaagaacgacacgatactgatccaattgctcgtcaaacccagttcggatgatatttccctccgtaataacagcagacgcttccggagcaatagctgaggtaatcaagcggtgcaattcaggaagttcatccaagcgtgcaattaagacatctaagactggatcaccaatccccagtagaatcgacttgatcgtcggcacatgccccagagtatctcctagctgcaagagatccttaggattgatcttgccaaaggaaacacgactcgctaagcgttcaatgtcatagacccctttgagactgtcggtcaaatcgctccgttcaaagaaatgatccataaagacctgaatgatgtcctggcgctctcgaatccgtttcaaatcgactaagggtttctgaatccaggaccgcaacaaacgaccgcccatggccgtcttggtttcatccaaataccaatacaagctaccatgtttcttcccagtccgcgcattctctgtcaaatcaagactagccttggtcgcaaagtccatctgcaagaaatcgcaaatctcataatgatgggcttttttgaggtggctcaattcccgcatttgtgtctggtagacatactggagaagttttccagccgttttcttttctagctcactcaactgatcccctaagagttgaacatcgtcgagcgccgtctctacatgtgacagcaagagattcatctggctaacaaacacacgctcttcctgttctggcaactcataacccaggaccacctcacgcgcacgtaaattgcggatttctccacaaaccatgctaaagtcattgagggtcgtcacctgaaactcccctgtcaccagatccatataggctagcccatactcatttcctgaacgatccaaagcaaccaggaagttgttctcactatctggcttggtcgaatccaccactgtacccggcgtaatcacctgtacgacttcacgcttaacgacccccttggcttctttagggtcttccatttgttctgcaatcgcgaccttaaatccctgttcaatgagaacatcaatatactgctgagccgagtggtagggaacacccgccatggggatcggattctctgcatttttattccgtgaggttaaggaaatctctaaaatttgagctgcattcactgcatcttcataaaataattcgtaaaaatctcccattcgaaacagcaaaaaggcatccggatagtcttttttgatatctagatactgctgcattccaggggatattttctctactgccatacttctttattccttactcttgcatcattttctgacgcaagccccatagatgaaaacaggagtagatagctcactatcttcctccttttgacatctctctttctctccaacggggcttgattactgcatcatccctaaaatttcattttgaatttcaatggctgcctcttggtcacggcagacaatcaagagggtattggcccctgctactgttcccaaaatacgctcatctgacatttcatctacaccattggccaagagagctgcttctcctagttctgtccgcaaaaccaaagtgaattctgctcgtgagaccgacttggcatggctggacaacataatataaatctctgccacctcaggctcatttggcaaaatataatacaactggtcttttcgtttcaccttgactagacccagatcgcgcaaatctcgtgacagagttgtttgcgttacagcaattccttttgcttctaaccgatcctgaatctctttttgagtcgacaatttttcatttcgaatcatttgttgaatcaaaaggtgacgttctgtctttttcattggacctccacttttgaataaatatactttaaattataccaaaaaaattgaaaattcgctcagaattgtgttaaaataatagttaaaaggactaaggagctaatatgaacaataaagaactcattgctagtgaattggccaaagtgattgactctcttgaccaagatgctattttaaatttgcttgaacaaccaaaatcatctgatcttggtgacattgcttttccagccttctcacttgcaaaagtggaacgcaaggctcctcaagcaatcgctgcagacattgctgaaaagatcgaccaaagtgccttcgaaaaagtcgttgcaactggaccttacgtgaacttcttcttagacaaatctaagatctctgatcaggtaatcaaatccgtcatcgaagcaggtgcagactacggtcaacaagacgaaggtcatggccaaaacattaccatcgacctttcaagtccaaatattgcaaaaccattctcagttggtcacttgcgctcaaccgttatcggggatgctctttcaaacatcttccgcaaaatgggctacaacaccattaaaatcaaccacttgggagactggggtaaacagttcggtctcttgatggtagcctacaaaaaatggggtagcaaggaagctgtcgaagccaacccaatcgatgaattgctaaaactttacgttcggatcaacgctgaaatcgaaaacgatcctgagcttgatgaagaaggacgtctctggttcaagaaactggaagatggagatccagaagcgactgagttgtggcaatggttccgtgacgaaagcttggtagaattcaaccgtatctacaaactcctcggtgttgaatttgacagcttaaacggagaagctttctacaatgacaagatggatgaagctgtccaaattcttgaagaaaaaggcttgttgaaagagtctaagggagctagcatcgttgagctcgatgatgtcaaccttccaccagctatgattaagaaatcagacggtgccactctttatatcacgcgtgatatcgcaaccgctatctaccgtgcacggacttacaactttgtgaaaaacatctatgctgtaggtcaagaacaatccaaccacttccgtcagttgaaagctgttttgaagaaaatgggatttgactggagcgacgatatggttcacgttgactttggtttggtgacaaaaaaccgccaaaaattatcaactcgtaaaggaaatatcatccttctcgaaccaactcttcaagaagccatctctcgtgccaaagctcagatcgaagaaaagaatcctgaattggaaaacaaggaagaagtggcacatgcagtcggtgttggtgcggttaaattctacgacttgaagacagaccgccgcaatgggtatgacttcgacctcgaagccatggtatccttcgaaggagaaactggcccttacgttcaatatgcttacgctcgtatccaatccatccttcgcaaagtcaacttcacaccatctacagatgcgacatacagcttgagcgatcctgaaagctgggaaatcatcaagcttctccaagacttctctcgtgttgtcaaacgtgctgctgaaaactatgatccatccttgatcgcaaaatatgctatcaacttggctcaagccttcaacaaatactatgcacacactcgtatcttggatgaaagcccagaacgcgaaagccgtcttgctcttagctactcaacagcagtagtcttaaaagaagctcttcgcttacttggtgtcgatgcacctgagaaaatgtaatttcttatctaatgattgataagtagaacatctcttatgggagtgagaggagaaactaaatgcgattcaatttagttctttctcactccttttctcatgcccaatgcccttcattctctacattttcagatcctttatatacaggagaaatctatgaatcaaaccgtttacatcttaatcctcatcagtttagtggtcctctttttatttaacaagtacgaaagagaaaaactacaacggctcttacaagagcaactcttgaaagatcaagctttcaaagatagcatcaaggaaaaaatccaagagaccgacaatatcaacgatgtcatccatgccatcaataaagactatcgattgggactcctacttgctaaagaaatcacagaaaaattaaaataagacatagaagaggagtcatataaaatgtgactcctcttctattcagtcgcaacaaataagaggctgggacaaaagtcctagcctctcaattatttttggattgtcgagcaagacgcagtggttgagtgggctctactacgctgatttcatcagcttttacagccctactcaactgtgcggaggtgggacgacgaaatcgaattctaacgaattaccgatttctgtcccactctctttattttaaagatgatacaaatcttctacaatagcggctacttttttaatatctcccaacatcccccgcatttcaaaatcggctaacatagggaaaccaaagcgttggctgtattgcttagcggttaaacaatattgattgttaaaattccgattgcctgatccaaccactcctaagcacttgctggcattgtctccataagcaataaaatccgcgacatctgtcgtcaaaatttccacatcgccattgtcaacaccatttccaccctccaaataggtaggcaaaaaagtgataaaaggattggtcatttcaaagaagggctggccctctttgactaggtctttcacatgaactttctcgatttcaagtccgggatgggcttccagcaaatagtcacttaaacggcggacaaaactctctgtatttccactcagactaatataaacaaaggatactttcatcttttttctccaatcaagaagctctcttatcctctaagagagctccctttaaacttatctattatgccctagcttgagcttttctcaaacgcaaggttttatacaaaacaattccaaggaagagaagagataaagcagtcaagagtaacaaagcaatggacgaagatgccagatatcgttggcgaagggacggggttgaaaaactagctaatagtgggcgccctgcaaaataattatagcaagagaaggcttgacttaataaaatctgccccatgtaagtataatgggctgttaacagatcctgcttcataaagaggaaatagaaagttgcaagcaaggcaatcagaagcagggaaacaaataaaaaggctagtggagactgattgagttgggccgatttctcataatatgtcacgtagtcagccttgtcttgagccgttgttaaaccaagttgtttcgcaaaatcatctgtcagctcaaaactctttgaagctccaaaggttgagacagctgaagtcagggttccaaccgtagagaaaaataacaggatgtaaagatagataggtttctttttcatacaaactccttttcatttcttacaccctattatatcgcgatacagatagaaaggcaagcgcctcaaaaccgtggaagcacttgcctgatcactgatacgttcaaatgaaattcatttggaaaataatgggtgcaaaagatgaaaagccatcgcaactgtatcattggaatgattagagatataacggagtcctataaactttcattcgaacaccaccagtatacctcattctcttcttcttgtgtcatccatttctattctgcttcatttcgacacgatttggtctataaaagccatttccgttttttgtccaagaactattctgtctttttttacaactatttggtcatcactccatcaaaaaagccagaaggacttgccttctgactttttttatttagatgaatgaacgaaagaaataagaattaatcttcttttttcttgcgagcaagacccaatccaagcaatccagccatcgcacctgcaagaacagctgcagctgagctttctgtacctgtatttggaagcgcaggtgtttgtggttgcgcaggttgtacaggttgttccggaacttcaggagttggttcggttggaacctctggagttggtggaacgattggtgtaggtggaacaattggtgttggtgggttgtatggagttggtggagttggaggaactggcgttggtggggttggaatatctgtttccgttaccactttattcttatgccatttcacttcagctgattgaggttcctcagttttagggattgttttgtattttggttgctcaggggcttttggttcaattggagaaactggagaaaccggtgcgactggtgttggtggagtcggttctttaattttttcaatttcctccttcaccggtttaactggcgccactggagataccggattcaatggagtaggcaatgttggttttacttcatttaattttggctctactggggcaactggagaaactggagctggcggaatgacaaatgaacctggattttttggaagaccaacatttgagttgattgcgaaccaataaacagtaggttgaccagccgcattggctccattagccgtaaagactaagtgaccatcagacatcttcaagcctgctccaccataatagaggtatggagaagatggatcatcccaaccacgaagagtcgctgaagattccccattaaagacggcaccatgttcaatgtattggttatctttatcagatgttacttctttagtagccgcatcataagaaacacttgagtttggaattttaataaatttattatctccaatatttacagactcttggtgcttcacgttttcaaatttcttcttaggtgtgaacgtaatttgacctgtagttgcatctactttgtatgaaccaagaacatcatccttaccttcaaaagtaaattcttctgtaccaatagaatgaacacttcctgaacccgaagcattcacagttaacgcatccgttacttcttccttctcaggggtagtaccaggagcccatttacctgtctcgacttctacataaccatatttctgtgttacaattttgaggggattatctgctgaaatggaaacagttgcagtaccgaagtctgcttttcctgttttaaccttcacttcattgttttcaatgctcatggatgaaccatctgcatacggatcccaagtgccacgtacagtgtttccatttacatccttggcttctactgtgatagcacgaggtttatctccactatctacataagaagcacctgtccagtggttgagagagttcaaagcgacaatcgcattatgttgggtcaaatcaaacttattgccatcgccatcatagaattcaacatcgacagcaactttaactggtttattttggtctgttgaagcaccgactgtcatggttaccgttggatctgcgttgactgctgcaatccctttgccatcatttgatggaagacttaaaatctcataacggtaaatcacacgtttgattggatgcatatccgtattttcacgcatgctggactgattcaagttatcataagtaacgacaaatttatcgccttctttcacttgaatgtactcagtttcattattggtccaaggactagtcgctacaatatctgaagcttccaattcattggaatcatactgatgcacattgcttttattcaagcgtttttgagcatcacgagtaagataagtgctgatgccgtcaatggtgtgagttgcaccaccttcacgttggaaagtcaaatcttgaacagtttcaacatctttcaaatctttgaaaccattgtcagtcatatatttttcatacgcttctttagcatttttgtattgagccaaagcggtttcaatacttgcaagtttcgcttgataaagttttgcatattgttcattcacagcatcataacttgattttgctttatcataagctgcttttacagccacaaactcaatttcgtttgaagcgtacttagcttttgcttcctcaaatgctttcttatcttcctcatactgagatttattatttttatataagttttttgcagctgttaaatctttagctttgtcagtaagttccttagtaggttttccgtctttgtctttttctacttctttttcttcatcttctacaatcgtatcactttctacaatatcaacttttgcatctttgtagattgctttaatttcttctttgacttttttaaatttgtttaatactgtatcgtattcatcttttgctttaccataagaagttgcagctgaatcatatgctaatttatcttttgcatattgttcttgtgctgtttgataatctgagacagctttattatattcttctgtagctttattatatttcgccatttctgaatcatactgtgtttttgcaatatcataacttgattttgctacatcgtatgctgttttagttgaatcataactagtcttggctgtttcatatgatgttttcttatcattataattttcagcatctacatcatattttgcttttgcagtttcatatgctgatttatctgcttcatatttagctttcagcgcagcatattccgccgaatctgtcccaccagtagatgtcgcagcgttataagcctctagagcagtttcgtatgctgtcttagcttcattatatgctgctagatcttgttggtattgtttttcagctacagtatattctttagtttgttgatcgaattttttctcagcagctgcttgagcaagtttatttttttcaaactctgcttttttagattcgtatgattctaattccttatcatattgaattttagcttcattatactgggcaagtgctgcgtcataagaagtttttgcagtattgtacgacgctgttgcatccgcaaaactcaacttattatcagcatattttgctgcatctgtttcatatttagctttactagtttcataagttgcttttgcagcttcgtattgctccttaactagtttataggcatcagagtctttacttgcagttgaagtagtagctgctttatatgctgctaaagcttcttcatatgctttttgggattctgcgtaagaagcttttgctttttcatattcagctttttgagcctgatatgccaataaatcattctggtattcagtattagcttgatcgtaatcagcctttgctttagcattttcagcttctacttgcttttgttcagctaattttgcttcatactcagctttggcctttttgtagttttcaacgactgtgttgatttcagctgtttgggctttgttatctgcttctgctgctacgatagatggttggactttttcagcttcttctgtaacggtcacaccttctgtagctgcatcagcttttgctttttcaagttctggtgattctacataagtagtcgtaactgttttatttccttctgtaacagttgtagatgtcaacctagaacttgttgcaacagctgcatcgcttgttgctgtatccgtagtagtcgcttcagttgcaggcgctgttgcctcatctgctttcacttctgctccataggtattaacagtagccaatccagcgatggctaatgaaacaacaccgactgataacttacgaattgaaaatttttcctgcttcgaaacatgttcacgatagcttttcattttcaaaactctcctttttatgtttaaaaaaatctcactgtagaggcaaaaatatgctactttcagttaaatctattgtatcacaatcaaccattttaaaatatttgttgatttaattttttattttactttaaagatataacaacttgaaacgccaaactttcaagttattcttcatcttttggttgaaaatatatgtaaacaggcttgaaaaaacctttattttcaaaggttttcaagccgctttctctttttataaatttcaccggaaggcttttttaggggaagtatttttttataccaatagattagatttgaaggttgaaatgaaaaattatgtaacattttccctttttaggtccgtaaaattcaaaaaaacaacaaattttaaggaatcagccattgcttgaaaccccttacctagaccttagttagagctatttttgggggggcggttattcccttttatttcgaaaaacgggcacatcgttttttctttttcgatgtctccttcactttatttcagaaagcaacatgaaaatcaagggcaaattgaaagaaaatctcctcccacactcatgcaccatctgtagctacgctcctcacaatctctagtcctttccaatttcctcccccaattttataaaaaaagaccaaggtcctaagaaccttggtctaataactagtgattagtttaagtgccagatatcttcgttgtactgagcgatcgtacggtcagatgagaagaatcctgctttcgcaatgttaacgatgacttgatccaaccatgcatcacggtcttcgtagtcagccaacatacgttctttggttacaatgtagtcttccaagtcaagaagagtcatgaaccagtctttgttgatcaattcattgtgaagacgagtcaagcgttctttgtccccaacagcaagaacggcatcgctgacgatgaagtctaccaatggtttgatggcttcacgttcatagaagtctgctgatttgtatgctgatttagcgtaaagatcgataaccgtttctgaatcttcaccgaagatatagatgttgtcacgtccaaccaattcagcgatttccacgttagctccatccatcgtaccaagtgtcaatgcaccattcaacatgaatttcatgttaccagtacctgaagcttccttagaagcaagggagatttgctcagaaatatcgctagctgggatcaagtagcttgcagcagttacgttgtagttttctaccataacaacttgcaagtgtggagctaccgctggatcgtttgcaatcacttcagacaagcataggatcaagtggatgatatcttgtgcaatggtgtaggcaggagctgctttaccaccaaagagaacagtgattggacgagcagggatatttccagctttgatgtccaagtatttgtggatcacatacaaagcgttcatttgttgacgtttgtattcgtgaagacgtttgatttgggtatcaaagatagaatttggattgatttccacaccttgatggtctttcaagaaacgagccaatttgcgtttgttgtgtgacttgatgttttccaattttgctttgactgcatctttatcttcataagaaagaaggtcttccaatttagatgcgtcatggtgccagtcacgtccgaggatatcatccaagtagtgtgacaaggttgggttagcatgcatgagccaacgacggaaagtgatcccgttcgttttgttgttgaatttttcagggtaaatgtcgtagaaggctttcaactcagaattcttcaagatttctgtgtgaagtgctgctaccccgtttacgctaaatccatagtggatatccatgtgtgccatgtgtacacgatcgttttcatcgataatttgaacagctggatctttgtattcagcgcgaacacggcggtccaattcttcaatgattggaaccaagtgaggaaccacttcttgcaagaattcaagtggccatttttcaagggcttctgcaaggattgtgtggttagtgtaggctgtcatgctacgaacgatagagatggcttcatccattccaataccacgttctgtcaaaagacggatcaattcagggatgaccattgatgggtgagtatcgttgatttggacaacagcatagtcagcaaggtcatgcaagttgcttcctttttcgatggcttcgtcgatgatcaattgtgcaccgtttgataccatgaagtattgttggaagatacggagcaattccccttgacggttactatcatctgggtacaagaagagggtcaagttgcgagcgatatctgtcttgtcaaagttaataccatcttcaataatagatgaatcaactgaatccaagtcgaacaaacgcaaacggttcttggtatcaatcttgtaaccagggacatcgatatcataaagggtagaagtcaatgtgaagtgtgcaaatggcacttggtagctacggcttgaacgaacgagccagctttggtcagtcaaccatgcgtttggaatcgtttcttgttggttgtttttaaggacttgttggaacaaaccaaagtggtagttcaaaccaaccccatcccctgtcaaaccaaggcttgagatagagtcgataaagcaggctgccaaacgtcccaaaccaccgttaccaagtgatggttccaattccacttcttcgacttcgatcaagtctttaccagcatctgacaattcttttttgacatcgtcgtaaagacccaagttgatcaagttgttagacaagagtttaccgatcaagaactcagctgagatgtagtaaacttttttcttaccagtatttaatttcttttgagcgcttgcttgcttggtgtaatttagcaaggcaatgtacaattcttcatttgaacattcagcaattgttttttgatgatgatcaatcacatatttttgtaatgattccatgttgggagtctcctttgtttcaacaattttaatagggggaaagattatttttttgctttcttaacttcttttttcaagtctttgttttcacgacgatagatcgtagtgaaatcaagcaattcttgctcgacagctggagtcaattgatccgctgtcattcgccatgaccagttaccaccgagagtagatgggaagttcatccgagctgagccatctaactcaagcaagtcttgcatcgtagcaatcgccatgaagctgacggaagcaaagacggtacgaagcatcgcatgcggtacagattcgtactctttccggttagtataacgagcaaggtactcacgagttggatcgtcgatttcattgcggtaccatccaagaactgtgttgttatcatgtgttcctgtatacatcacagaattgtttggtgccaagtgagggctatcgatactttcatcgtccggattgaaggcaaattgaagaatcttcattcctgggaagccagtgctttcacgaagttcgatgacttcatctgtcataaagccaaggtcctcagcgatgatgttcaaatcaccgagctcttccttcacagctgcaaagagtttgtagccaggacctttaacccatttacctggtgctgctgtatctgatccagcagggatttcccagtaagactcaaaaccacggaagtggtcgatccgcacgatgtcgtagatcttgaagctttcacgcaagcgttcaatccaccattggtagccatctttgtccattgcttcccagtcatagattgggttcccccaaagttgaccagttgctgagaattcatctggcgggcatcctgcgatgcaagtcgctttcccgtttttatctgttttgaagagatgagggttcgcccacatgtcacttgaatcttccgctacatagattggcatgtctccgacgatttcaatgtgatggtcattggcataagctttcaaggccaaccattgttggaagaagaagaattgagtcacacgatggtaagtcaattgatccgccaattcttcacggtattgagccaaagcttttggttcacgtgcacgaatagctgcatctggccattctgtccaggcttttaaatcaaagtgttctttgatagccatgtattctgcaaatagttccaaccaagaagcattggcttcgcaaaaggcttggaattctttttgatcacctgatttcaagaagttcgcaactgctttttcaagcaagggacgacgttgttcgaaaacctttgcataatccacttgagtaggatcttgaccaaagtccactcctttaagatctgcttctgtcaacaaacctcgttcaatcaaaagatcgaaatcaataaaatgagtgttcccagcaaaagctgagaaagattggtatggagaatctccataactagttgtaccaagcggcaagatttgccagtaacgttgcttggtccgaacgaggaaatcaacaaaatcatatgctgattgaccgaatgatccgatcccgtattgtccaggaagggaagaaatgtgcatcaaaacaccactttgacgttttttcatgggttaccacctttttttatttctttgaagcctgcgattcggtgcacggtatgggtatcgttgcagagtcgtatccagctctcaagcggctctactctttgttaaaaatcgaacaggcgcaactcagtttacgcaatttttgcgaaaacgtttgcgtaccatgttattataaactttttccctattttctgcaagggatttcttaaaaacttttttaacttttttcagaatgtcctcacccccttagtgtattctttcctttggctaatgtcaacaaatttgatgcattttatagaagaaagttcggaattaaaatatttttaaaaaaaatgtttaaaactacttgcaaacgttttcgccttgtgatatacttaagacgttttaggaaaacgtttgtctaaaacggtttctaattattatctttttttattctttaggaggaataaatcatgaaacgtacaattttacgtagtgctgctgtacttggtacagttggttttgccggcttcttacttgctgcttgtagcaataactcatcaggttcttctgaggcaagtaaagaaatcaacgtctatgtagacaaaggctacaaatcttatgttgaagaagctgcaaaagcttttgaaaaagaaaatggcgtaaaaattaacatcaagactggtgatgctcttggtggattggataacctttctcttgataaccaatctaaaaaagctccagacgtaatgatggctccatacgaccgtgtaggtggtcttggtagcgatggtcaattggctgaagtgacattaaacaaagatagccatacagataaaacaactgaagctcttgtaacaaacggtggtaaagtttacggtgcacctgctgtcatcgaaacattggttctctactataacaaagatcttttaagcgaagctccaaaaacatttggtgatcttgaaaatcttgcaaaagatagcaagtacgacttcgctagcgaacctggtaaaacaactgccttcttagctgactggacaaacttctactacacttacggtttactttcaggtaacggcggttatgtgtttggtaaagacggtacagatcctaaagatattggattgaacaaccaaggttctatcgatggtatcgaatatgcaaaaacttggtatgctaaatggccaaaaggtttgcaagatacaaaaggtgctgctaacttcatccaaacacaattccaagaaggtaaaacagctgctatcatcgatggtccttggaaagctgcttcattgaaagaagctaaagtaaactacggtgtcgcaacgattccaactcttccaaacggaaaacaatactctgcctttggtggtggtaaagcttgggttatccctgcaggtgcgaaaaaccttgatggcgctcaaaaattcattgacttcttgacaagtactgatcaacaaaaagctttgtttgacaagaccaatgaagttcctgccaacacagaagctcgtaaatatgcggttagcaaaaacgatgaattgacaactgccgttgttgatcaattcaagaacgctcaaccaatgccaaatatctcagaaatgagtgctgtttgggatccagctgctactatgcttttcgatgctgtaagtggtaaaaaatctgcaaaagcatctgctgacgatgcagtgaaattgattaaagaaaccatcgaacaaaaattcggtagcaaataagacagtttttaggtgtgagtaagaggttggagacaaagtcccaacctcttatgttcaattttcaaacacaacttactgtctgacttgtcttcttgctctctagcaaggacattataaggagatttgaatgactacagaacaaaaccctaaaaaggctatgtggctctctttgatcccgggtcttgggcaaatttataacaaacaaaaaaccaaaggctatatttttcttgccgtaactgttctctttctcgcctatttcctaggaatcggagttggagaattagcgaaattggttacacttggaaccgtccgtggacaagataattctctctttatcttgattcgtggcgccttccacttgatcattaccattgtttacttcctattttatgccttaaatattaaggatgctggaacagttgctaaacgcatcaacaacgggattgcagttccaaaaaccttgaaagatatggttcatgcgatctatgaaaatggcttcccatatttattgatcattccttcatacattgctatgacatttgcgattatcttcccagttttagtaactttgatgatcgcctttaccaactacgacttcaaacataccgctccaacaaccttgctcgattggatcgggttccaaaacttcactaatatgtggaccttgagtaccttccgctcagcctttacatctgttcttggctggaccttgatttgggcactcgcagcttctactcttcaaatcgtactcggtatcttgaccgctattgttgcaaaccaaccattcgtaaaaggaaaacgaatctttggggttatcttcttgctcccatgggctgttccagccttcatcactatcttaactttctcaaatatgtttaacgatagtgtcggtgctatcaatgcacaagttatcccattgtttgcgaagatcttcccattcttagatggcattttgattccttggaaaacagatcctacttggacaaaaattgctttgattatgatgcaaggttggctcggcttcccttacatttacgtcttgactttagggattcttcaatctattccaaacgatctttacgaagctgcttatattgatggtgccaacggttggcaaaaattccgcagcatcactttcccaatgattatggctgttgcagctccaactttgatcagtcaatatactttcaactttaataacttctccatcatttacttgtttaacgatggaggacctggttctgtcggaggaaacgccggatctacagatatcttgatctcatggatctacaagttgacaaccaattcttctcctcaatattcaatggccgcagcggtaaccttgattatctctgtgattgtgatctcaatctctatggttgccttcaagaaactacatgcatttgatatggaggatgtataaaatgaaaaattcagttcaatttaaacgccgcctcaatcatttcttgacttacctgtacatggtggttctttcaatcgttatcatttatccattgttgattacggttctatcagccttcaaatcagggaatgtcagtgcctttacacttgattttagtggcaatcttagttttgataacttctcaaaacttttctctgaaactcattatggcacttggtatatgaacaccttggttatcgccattatcaccatgattgtacaaacaagtatcgttaccttcgcaggttacgcatacagccgttacaatttcttggcgcgtaaacaaagtttggtcttcttcttgattattcaaatggtcccaaccatggcagccctcacagccttcttcgttatggctttgatgctgaatgccttgaaccaaccttggttcttgatcttcctttatgttggtggtggtattccaatgaatgcctggttgatgaagggatacttcgatactgttccaatttccctcgatgaatctgcgaaattggatggagctggacacttccgtcgcttctggcaaatcgtccttcctcttgttcgtccaatgattgccgttcaagcgctttgggctttcatggggcctttcggagactatatcttgtctaaattcttgcttcgtgacgaagtgaactatacggtagccgttggtcttcaaacctttatcagtgaccaaaaaaatcaaaaaatcgccttctttgcagccggtgctattttgatcgcggttccaatctgtatcttattcttcttcctacaaaagaactttgtttcaggcttgacagctggtggagataaaggataaaatagaatcttatttcaagcacattttatttttaagttgagggtagtatggtggatgctttactacccttcgttaagaataaaatcaatgcaaagagatttctctttgcatttctgatactcttatatttagaaaggtcatcttatgccctatccttttaattatttcgcaagtatcttcaatttccgctcttcttttgcaaaccgcaaaaaactgagctggttccaaatgatttttacttctttctttctaatctctatcacactattacctgtggctctgcaaaatgctcaactcaaaacctatcctttgacaacctttgtcagcgatgtgtttgatcctttatcaacagacgttatgaaagatatccaagaacacgtcgtgatcaaagaccaagagctcacctatacagggactaaccctgtacacaagacttcaaaaggacaggttatcttaggccaagaggcaaaggctagtgaaggcaaggagttaacactccattttgatcgcaaacaattgattatctcaaaagagaataaagaactcgctacagtctcataccaggctattaatcaagagagccttcgggataaaaaaagcttcactcaagctatctctagcgattggtttcgcgacaatcgactccctgtcagtctctttctcgtgattttctctggcttcttatcgacagtcaattatttgattctcatcgtaggggcatctttcttcctctacttgacacgaaaatctcgactcttttcactacaaactttcaaggaatgtttcaattgtattctgaattgcttgggactccctattttactgagtgtcttcatcagtttactattccatcaagtatttactacgacgatcatgatccaaaatgtcttatttgtactctatcttgctatggtattttataagacccacttccgtgatccagactatcaccgctaggaggttttctcatgcgtgttaccatcaaagatgtggcgaaactcgctggcgtcgcgccttcaactgtcacgcgcgtcatccaaaacaaatccacgattagtgatgaaacaaaaaaacgtgtccgtgaggccatggtcgaattggactaccatcccaatcttaatgctcgcagccttgtcagccaatctagtcaagtcattgctttggtcctaccaatcgacagtgacgtcttctaccagaatcctttcttcccaactgttttaagagggattacccagatcgcgtcagacaatgattatgccatccaaatctgtacggggcaaaatgaagaacggcggctcgacaacctcaaacaactcatctacggaaatcgtgtagatggtttgattttcctttattccaacccgaatgatcccctcgttgaatttgcgatcaaagacaagttccccttcctcattctcggaaaggcagcttcaccttttgtatcgctagtggataatgataatatcaaggctgcatttgatgcgacggattatttcattcaacaaaactaccgaaaaattgcttttatcgggggaaacaaagaactgttcgtatctcaagaccgctacgaaggttataaagaagccctccaaaaagcagggattcctctcgatgaaaaactcgttcatttttcatttgggtttatgttagaagataattcttatcaaatgatggagagtctaccgttaacagaactagatgcgattatgacgaccgatattctcgttgctgaaggggtgcgccaatacctattagaacaccagctgacaatcccgattatttcctttgattcgatcaagccacgactcgatattgaagcctatattgacatcaatgcggtggaactcgggcgtgaatctgtccggaccatccttcaaatcatcaaagatcacaaagaaggaaaaactgtttgctaccgtcaattgattgaccataccattacgaaactttaggagtctttatgtctacatttactgcttatttagatgaccaagacctcattcgtatccaaaagggagaggagcatatccttcctttttatttgaaaacgaaccaaggtcatcttgccttaatccctgtcaaaacgtcaagtgcagcgactgacacaggagactatttcttaagccctattccacttgaactcggagaagagtacaccatctacgatgctactggaaattcttctatactccactatcgaaacatcgttcgcaaacccattttcgatcaaaccttcacctatactggagaagatttaggaagtttttacacaccaaatcagacgcaatttaaattctgggcaccgatttcgcaagatgtgagtctccatatcgaagatcagatctatccgatgacacgtacagaaaacggtgtctggaaactcttgctcaaaggggattgggaaggagctgcctaccactatgaatttcgtgtcaatggcctagaacgtcggattcacgatccctatgctctatcctctttggccaactctggagacagcttggtcatcgaccggaagaagattacacgtcctatcacacgtgctgctcgtcaattagacccgacagaagcaatcatctacgagatgagcgttcgggacttctctgtccaaaaagaggccggctttaaacaccctggtaagtttaaagggttgacagaatcgcctcaactcaatggtcagatccttggatttgattaccttcaaaaacttggcattacccatgtacagttacttcctgtctatgatttcggtagtgttgatgaagagaatcaatggaaagcctacaactggggttatgatcctgtccaatacaatgttccagaaggtagttatgccagtgaccccaacgatccttatgcacggatttgggaactccaagatgctattgcaacctatcaccaatctaatcttagtgttatcatggatgtggtctacaatcacgtctaccaggccgatgagtatgcatttgaacaaatcgtacccggttatttctaccgctataatgcagaaggagagcggaccaatggaaccttctgtgggaatgatgtcgcaagtgaacgttccatggtaagacactatatcaagcaatccctcaagcaatgggtttccctctacggctttgatggttttcgctttgacttgatgggaatcttagacattcaaaccatgacagagattgcagaggagctccgtgaaatctatcctaacgtctatctctatggcgaagggtggaagatggatacaggcctctctgaagaccagctcgctcaccagtacaactcaaaacgattaccagattttggctttttcagtgataatttccgggatacggtcaagagaacactcttagccgatcaccgtcgtgatagtcaacatccagccaatgatttttctaatatcctaacagcaaatgtcgggaaagtaggacctgctcatttcatccaacctcaacaagccattcagtacgtcgaatgccatgacaatgcaactgtttttgattatttccaacttgaaaaagaagcgattcgtctagaggagcgaaaagctctctcacgcctcgctcttcatttggtattattatcccaaggtgtaccttttatccatgctggtcaagaatgttaccgcacaaaagggctcgaagacaacacctataacttgccagatagtctcaaccaattggactggacatccctttcaaaatgccaagaagaacttgcttttcttaaagaattgattgcttaccggaaatcgcaacctctccttcgtttgaaaaaaggacaagagattcgagattactgtgatgtcaaatggttgtctgatcatcattttatctacacgattgaaaaaaatcgtgaaaaaataacgattctcgttaatctcggtgatcaggacatgacctatcaacatccgagcgatagtcaactgctatttgcctatcctcatgcaaatctccaaacgcctattcctaaaggaaaggaactttctatttccgcccatagttggctccttctccgagaagctgaataaacaaaataaggtcaccacaatgtgggaccttatttttattcttctgtttccacaaagcgtccaatgatatgaacgttttctgaaatggtgataaaagcctgaggatcagcttttttcataatatatttgaattcattaaactctgcacgcgtaataactgtcagcagaaccgctttttcttgatggttataggttccttctgcattgtggataatggttgctccacgatgcaattttttatgaatcttttcaataatagcatctggctggctcgttacaatcatggcctgcatccgtttttgcttggtaaagacagcatccgttactcgactcgatacgaagatggtaatcatagagtaaagagcatacttccaaccaaaggtcaaacctgcaatcaacataatggtcccattgaccaaaaaggagatgctaccgacattctttcctgtccgttttcgaatcgtcaaactgacaatatccgttccaccactagaaatgttattccgaagggcaaaaccaattcctgtccccatgacaactccaccaaacagggcattcataatcggatcgttggtcaaagtaaccactggcacaaactgaataaagagggaactcatcgaaaccgtaataaaggtaaagatggtaaatttatgtccaatgtggtaccaagccacaatcattagaggaatattaatagcataaaaggtcaaggaaacgggaatcgtaaaacctataaagcgatgactcagaacagataaaatctgagctagacctgttgcaccactggagtatacatggcccggttgaaagaagaagttgacagcaattgctgatagaaatccatacagcaaggaagctgacactttttcatcgtatttctcacgggagatgctcttcagcacgcgcaataatttaatgttataagctagtcgccacacatgatagcgaaatagcttatgaaagcgagtatttttcattttcaatccatcgattagaagaaaaggaaaatcttagagcaactgattcctagactttcccttttctctcttgtcctattcttgctctgctacttctacttgaagatttaactcatccaattgtttttcagaaacgacagaaggagcttgtgtcattggatctgtcgccttgttattcttaggaaaggcaatgacttcccgaatattatcttcacctgcaagaagcatcacgaagcggtccaaaccaatcgccaatcctccatgtggtgggaaaccgtaatccattgcttccaacaagaacccaaattgttcattggcagcttcttttgtaaatccaagcgccttgaacatccgttcttgtaagtctttatgattaatccgtaggcttcctccacctagttcatagccatttaagacgatatcataggcaattgctcgaacttttgaaagatcaccttccaattcatgctctgtttcagcttgtgggagtgtaaatggatggtgagcagacatataacggccttcttcctctgaccattcaaacattggccaatccactacccaaaggaagttgtattgattgttgtcaatcaagtcaagctctttcgcaagacgaacacgcaaagcaccaagcgtggcattggctacttcaagagtatctgctacaaagaggacgagatccttgtcttctagctgtaaagcagttgtcaagtcacttgtcaagtctgtcaagaatttcgcaacaggtccgttcaaggcaccttcaacatatttcacccaagcaagaccttttgcaccgtattgcttcgcaacttctgtcaatttatcgatatctttacgagagtaatgatctgctgcacctttgacaacaatcgccttaactgctggagcttctgagaagactttgaagtctacacccttgacaagttctgtcaagtcttgaagcaacatttcaaaacgtgtatctggtttatccgaaccatacaaggacatggcatcatcataattcatccgtgggaatgggagtgttacctcaattcccttggtttctttcatgacacgtgcaatcaagccttctgtgatatcttggatttcttgatcactcaagaaagaggtttccaagtcgacctgtgtaaattcaggttgacggtctccccgtaaatcctcatctcggaaacacttcacgatttgataatagcggtcaaatccagcattcatcaacaattgttttgtaatctgaggactttgtggaagggcatagaaatggcctttgttgacacgggaaggaaccaagtagtcacgtgctccttctggagttgacttagaaaggaacggagtttccacatcaataaactctaattcatctaagtaattgcggattgaatgagttacttttgcacggagtttgaggttttccaacatctcaggacgacgaaggtctaagtagcggtaacgaagacgagtatcatcattggcttcaattccgtccttgatttcaaatggcgttgttttggcagtattaagaaccgtaatagtctctaccttgagttctactgctccagttggcaagttcggattcgcttgttcacgagcttccacaagacctgtcacttctacaacatattcactgcggatgctttcagctgtggccatcacttctgcactaactgtttctggattgatcaccaattgcatgattccttcgcggtcgcgtaaatcaataaagatcaaaccacccaagtcacgacgacggctaacccatcctttcaaggtaatatgagttccaatgtgttcttcacgaacacgtccagcatacattgaacgtttcatttctaattaatctccaaactaatattcttccttctattttaccataaagaccagcagaaagtggcctttagcttaactttttcagtcaccaacttctttaattatcgtggctctcttctttctttttgggatcatcgtagagagtgggtgctagcaccttcattaaagtcgccgtcccaaatcgcaagacagctgctgctagtccaaaaataggggataggtagcggaaaaagaaatctcccctaagcacataggtcataccaccaacaataaaaaagatcacaattccctgaacgattgcgtaaaaccaaatttttttcacactattctccttttcacaaaccagctgacttatccactgttttttatcacttatccacaaaaatgtggataactttcactttttgccccatcaaaagaggaagcgtcagaagcatcaggacttgctttcatccatttacaagcaagtttcccacagcctgtggataactctcttgcttatttgtgactttctcgtcactttcctcacaaatcaaggagccaggatttgatcctgccccctttgatcaagcattatttaaattcgtctggtgtccctttatattgggcccagtctttgctgaagaagcgatcatttagatggtaagttggtgctttttcagcctttgtgacaaagggattgaccgctttatcaaaggctagccaaccattccatcccatatgaatcgtatcttccataaagtagggctgatcaccatctttagaaaagtctgcaatattggtgaatccttggctttccaattggtaacgaatcttttgaacagcctgttcatacttttcttggctcaagcctgtgtatttcatccatttggcattaactggaggaatgacaaagataacattgatccgagatttagcaaactggtctagaaccaactgcaagtcattgtactcaggagattgaacataggattcgtttttttggaaaccttttagtttcttcaacttcatttttaaacgagtattgtaaaaatgattgctgattccaaggtcgttgttattggttttgacttttgcttcagccgttgcaatttcttccaatttctcatatgagaattgatctggtaaatcttgtagacgttttttgactttcttatcgtaattcccatttgtacgcgttgcaagattactaaacaaagcatcttcgcgttgaacaaggtgggaaacaaactggttcaaagactgatcaaatctggaaattttctttccttgagaaattttcgttacaacactttgaaaggcgacatttggatactgttgtaacagacgctttgcagcatactgggatgcagcatcctgttggtgattggcaataaagctattcaactgatcgctattaaagaattgttgaaaggcagaggaatcatagcccttcttggtgaaccattgcggagaaactacataaacagctgtattgtccttgagttctggcaaaatctgttgcattccaaaatactggttcaaagaagccgcaccgcgttctcctaaaaagtagggtctgtaattgcggtcatatttctcagccaaaactgctggatgcaccacatcaaagcgcaaccattcactggagccgaaataagggacaaagcgatgctgtggatcagaaagtgcttcttgtttctttgtacgactcttgaatccttctgcattcagactaaccgcagcttttttctcttcggtatagttgtgcttatgattgattggataaaagaataataaagctgttaccatgaggagcgcgcaaaatacgggccctaaaatcagccacaaacgcttaagcattctgaagctccgttacaccttctacgatcttgttcgcagtattccaatcatcacgtccaaattcagatacaggaacacggatgccaaagcgattttccagttctacaatcaattcgactgttcccatactatcaaggacacccgcatcaaagagatcctcatccatcatgtctgagacatcttccataaacaattcgtcaataatttcaattacttgtgattttacatccatttttctattctccttttatttcaattttggaaaccattgttgatccaagaatcctgagaaaatcaggaaggacagcatcactgtgttaaaggtgataaagatccctaaagctttggtccaacgattgtccggtatcggatccaatccttttgcttttctttctttattgatggtctttttcttacgaatccaagcatcattgatgaccagtccaagcccatggaagagcccataagcgatgtagtaccaagtcaccccgtgccagaagcccatgaccaacatattgataatgtaggcaacatttgaggtggtaatccggctcttgaacactttattgcgcatcagtaccattacgagacgcataaagacgaaatcacggaaccagaaagataaactcatatgccagcgattccagaattcctttaaatcacgtgatttaaaaggacggtcaaagttgatgggacttttaattcccatcaaattggaagctgctaaagcaaacatggaataccctgcaaagtcaaagaaaaggtcaaagccatagacatacatgacccccagcgttccaaggttaaagaatccaccttgagacaaggcataggtctgcacatgacctaacaataagtggccaaaaatatgagctaggataaatttataaaggaagccatacatgatatacttaacagcttgctccaacatatccaataattcttcgcgctcaggaatggctttataatcctcattaaaacgcttgaaacgatcaatcggcccacttgagaaggttggcataaagagcataaaacgcaagaattcccagagcgtgaattctttcaagacaccatctcgcatttcgatgatcattccgacagctcggaaggttaaatacgaaatccctaaaaatccaaacaaggattggtgcccattcttgatcgctggctctaccttaacaaagatcaggggcaagacagacaagaaggaatgaagatagaaaatccacttgttgtccgctttctgacgatagattttgtaggaatacacaatcaggatttgccagactacgtaaaagagcagggcataaatttgcttgagattcgaacctgtcagcatcaaaatgataaagatcagactcaccagtccttcatagaccggaaatctctttttgaaaaagaggcccacaaaaatcggcaaaaaagctagaatgaggtagataaaatagatcggtgttccatagtgttctaaatgagggagctgtttcaaaaactcgatcatcggttgttaacctcgctaatcaaccctttgatgtcgattttcccgtttggtgttaatggcaggctgtcacgatagaggaattttgaaggcatcatataagacatcatgatgttttctaaatcttccttaatagcttttgtgatatcaatttcgcgctcaaattgttctttgacaccctcttttaagatgacataggccaagagattttggaccttgtgatccttattataacgcggtactgcgactgctgagtcaatatacttcgatttattcaagttttgagagacatcctctagctcgatacgataaccgttaaatttgatttggaagtccatccgaccaccatagagaagaaggccttcatccgtcatggttccgacatctcccgtatggtaggctggcagaccttcaaattcaaagaaggcttctgctgttttctctggattattcatataaccttttgaaacggctgggccagatacgatgatctccccttgctcaccatttggcaatttgtttcctgcctcatcaatgatgaaggttggagaatcttctttggtgtaaccaattggcagacgtttcaaagtagctaacatctcatctgttacggctacagccgaaagagctacagttgcttccgttgggccgtaggcattgatgatgcgtgcatttgggaaacgctcgcgcaatttctgagcagtcttgactgtcaactcttccccatcaaagtagaaatgggtgatccctggcattttttcagcattgaaatcttcagacaacatggccatatctgcaaaagatggtgttgaagtccagatagcaatcggaagagaaaagatggtcgcaaagagttgtttgaagtcttgagtaatggctgatggaagagcaaaaagggttcctccaagagccaaggtcggtgcccagtacatgacagacaagtcaaaggaatagggcggttgcgccaacatttgcggacgctctggcgttgcaaattccttatccgtaatcatccagttggtaaagctgagcaagttatcgtgcgaaatttgcaccccttttggtttcccagttgtccctgaggtaaagatgatgtagtagttatcatcccctttgaccggatgtttcaagtcataggcatgctgagccgcataagcttcacgcacttgctccaaggacatgattggagcagctgggttttccaatggaaattcattgatggcaataatcaagcttggctctgctacttcaacaatggcagacacgcgctccaaggcagagtggctatcaattgggatataggcatggccagattttgtcaaggccacaaaggttgctaacatttcatattcttgaccaccaaagaccactacaggtgacttttcaggaagtcccatttggtcgatgtgggcagccaagctatctgaatcagccttcaattggccataggtatgctcctcaccaaggacattgtagacaggatagtctggttgtagttgcgcataacgttcaattgtctcgatcatatcagtaattggttggtttgacacggctaggagtctccttttctaaaattcgttgtagataaagccaccctgaccttgaccaaggtaactaaagaaataaagtagggctaggaaaatggcgaaatacaagaccgtctgcccgataaatttataaagtgttttatgtttcataagtttcactcttcattttgattgttactcactattttaccattttttataccaagtaagcaattttaaacatagtgagaatgtcgtagaaaacgttatcatttcagacatttatcccttctaaccaaaggatttttttctttaatcagtttttctgattgaaatcctgttttatttaacattcccctgacgaatcaactccagacacttgtccagatccacatctctctcgaaatggctaggtgtccaaggaatctctatatcgggtagaacaccctgatccgtcatccctttccctttatccacgcttaaacagcgagaggtgggaaacattaaacaaaaattgccataatcaactgtacaacaattagagtagtctagaatcccaagagttggtcgacccaccaccgttaccttcttaaactgcttcatcatctgaacaaagttatccccagaagaaccgcaatagatatctgataagacaaagatccgttcaggatagtggccacctttaacctctgggaagaattcctcgctttcttgctgatacagtacataacctttgcctcgatggcggagcaaatcctttttcatatcttcaagcagcttaactgtttcaggactaatttcttcctgttgcatccagtcctcaaaatctttcaagcgcagatcaacattgcgttccgtatagagaatttccataccatcatcgtccccgtcaagcgaatcatagccctgatccttttctaaacctagatgtaatagagggatatataaagaatctgtccctccgccgttctgtcgaacatcaatgagaagaaacttgacttccgtcatcatcggtaaacactcttgatatacccgactaatggctccttcatccataaagttatccagacgaagataaagaatctcatcgtctaatcgtttccaaaaaatctgatcttggatcggttctcgactagggactacttcaatggtcttttctatcccttctcgaagcagggtgacactcgttgactgagagaccaaatccgcccattctcggtagtgtctttcaggggtcttactgataaaatagtctttatgaagagaagctatctgatccaagtcacttccatccaaacctaggatctgatctcctacttgaagacccgtatcttcattagcttcctcaacatacagtttctgtccgtttattctcaaaagaaacccttttggactggcctttttatctcgaaaggaaacatgcccgatcaccccaaaactagctaggtaagtcttaacttgatagagaaaggcatcatctgtcatatcatctgtaatgttttctcgaaaaggctctagatcgcatccttttcgatccttgatggtagatgaatcatgggtcataatagagacgacatcttcaaaaatagcagtctttttcataagggattccttcaattttttagaaacagtataccactttttcttaaaaagttcttaaaatcctaaaaaactatcctaaagtaggatagccgttatagattctttcttttcttcgctttctttgtcagagcgacatcacaattttcaatcttgctaatcaatagattggcaagagcaaaatcatcgatgttcgatttcatatttacctcgtagttcaaggtcagttgttctccagcttggaccgttgtgacagaaataaagtcaatttctgaacaactttggtccaacaactgactgatttgttctgcaacagaatcttgttctgagacggtaatagtcaaatggcggcgccgttgatggtctgccttactctgtttgttctctaataccagccacacccctagtaaagaaagggttgataaaatggccaataaaagatagcccgatcctgctgctagtcctataatcatggctagaaaaatcgcaatcaactctctcgaaccactcgtagccgaacgaaaacggatcaaactaaaggtccctgccactgcaatcgaggttcccaaacttccattgaccaaaaagatcactaaggtcatcatacaaggaagcaaggtcaaactaatgacaaactctcgagtgtaaagtgttcggtatttataggtccaagatagggccagccctagaaagaggctgaccaaaagggccagcagtaagcgcaagggatccaccgctgctgtggcattattaaaaatagaatcaaatagattagacataggcagcacctaccgtttcttgaactggtcttggggcataatccaagccttgtgatttatgataagcacagctatattttgaaaatttctgtttcaccaaaccatacttctctaaaatatcctttagccatttaggttcttggccaggagccttaatttccatgatcacgaagtcatcctctagtagaggttctcctttcttcccaccaaaaaggctaacagcctggtctcgaaagactaagttttgatcgattgtcacgcgaatcttctgataaggataaccctgaatggatttcttttctttgagagacaaacgatcataataaatgaacatccgtggttccaatcgatgaccataacgtttgcgcaatctctgaatctcttgcactaagtctggatcttgtatctgatgatctactgtcccatctgtcatcaagttgataatggcttgcgaagtagcgactaggcggaatttatggccaattccttcttcatcttttgacttcacctctagaaacactgggctgtctgcttgaggtttttctatataagtccgcatccgaattttttcacggcggtgttgttttgcaagagcatcttgaatgacatcaaaattttccgtatcaaaataaatgtttgaaatggttgaggttgggtaatcatcttctacgacgtattcttttaagtctttgatcaagtccttcacgtcatcttttgcgacgatatattttgtttcgattcgtttgaaacttgtctcaattgtttttttcatgtttcttctcctttaagagggatctattgtttctaaccttcagtaagtatgaatacgacttacgtgctttctagtttaatgggactttcttaactggtcattaagccaaacttaaagaaaactaaagttaaggttcctttcagaaaaactttaggaaactttcagctagcaactttagactaggagcatatcaattgaacgagaggaaaagctcatgaaatcaaacaaatggaaatttttattaacgggggccgcaaccctcaccttactgacagcttgcacccaggcgtcatcacaatcagctacaaaaagcaatactgcacaaactaccgctacttctacttcaaaaaataaaacaaacaattccaactattttacagataaggacaaggacagctcttacgatgaaagcaaagcctctactgtaaaactgtctggatcttctgcaagtgtatcaggtgacggcgtagctgtatctggatccaccgtgaccatctcaaaggctggaacctatgtcatctctggtgaatccgatggggttcaaatcaaggtcgaagcaggtgactcagatgatgttcacatcgtcttgaaaggcgttaccatgaccaacaccaactcaccaatctctgctacaaaagcaggacatgtctacctcactttagcagatggcacgaccaataccttatctgattcaagttcaaacaatgatgaagatgccgatgcagtgatcttctctaaaggcgacctcaccatcaatggttcaggtacgctcaacattgatgccaagaagaacaacggtatcaaagccaatgacaccctccacatcacaggtggaacctataaaatcacggctgtaggagatgccttcaatgtcaatgacgaactcaatatcactggaacaaccatgaccattgacgcagatgaagatgcagtcaaggtggataatgatgaggatacttcggtcggaaccatgtacctttcagataacaaaatgaccatcacagcaggagacgatggcatccatgcttctggtgatctgatcatcgatagcggaacctataaggtaaccgagtctgtcgaaggtctcgaaggaaaatcgatcaccattaacggtggagatatcaccatctatgcaaccgatgacggggtcaatgcggctaatgccaatgccaaccaagatgaaattttcttcaccatgaacggtggaaccctcaacgttgaagttggccaaggggataccgatccaatcgattcgaatggaaacatcaccgttaccggaggaaccattaaattaacgggtcaatctggattcgactttgatggtactgctacctacactggtggagacatctatatcaacggtgaaaaacaaacggaaattgtcaactccatgcctggaggcggtggggctcccggagttggcggacctcaaggcggtggacctggaggcgggcatcaataataacaaacaaaggcaggatttcttcctgacctttttttgttgccttttttatgatagaatagaaaatcaatcagcttatcgaaaggaacatgatgaaaaaacaaacactccctcttttcttcacactgttgctgtctcttctttttctatcagcctgtgtgccggaccttaagatcaactttaaaaaagtacccactactaccagctcaaaaaagaaaacctttaaaaaaagtagctcgagtcgttctagccacccgattcgttcaactagttcaaatagctcaagcaactcctctagctctccttcaaccactacacagccctcttctgacatcgtcacgaccgaaggactccctaaaaatgctcaagaagcacccaaagataaaatttatgcgacagggaacttaaaagtagcctactctagaaatgacgataaaatttttgcacagacgccggattatgaaggatataccaccgctcttgtccaaacaattcttggaagtcctgaaaaacaaataacagaccctgcttatattgccgaatcttttgaaaataccgaattagaaaatattaaggggctctaccacgagggaaaaatcacaggggaacaagctcacgcctttttgatgggagctgttgatctcaaacaagcttctaaattcggagtaaactacaccatttacacctataaaaacaacactatccaactggtctttgacaacgaccaacttctctatattactccaaatcctgatgtcgtcttctttaaataatttacattctcgcttagacaagcgagaatttttgtttcacatgaaacaaaaaactcccaacacattctgttgggagttcccgaagattagtcctcttcatattgttttggattatagaaccacattcctagccctgcaaaaagagcaatagtcatcagaaggaaggccacttgatttccaatttctcctgtcatcgaaatcgtttgacgaagaccagaaacggtatagctcattggcaagaatggatgaatggcttggaaaaagccatttgtcaaagcaagaggataggttcctgcactagaagccaattgcaagagcaagaggatcaaggaaaggaaagcaccgatctttctttgccatgttgtcaaagcagtcacgatagacatgaaggccacactaccaatcacacaaaggaagagcgtagccatctcatgattagctgataaaccaatcaagtgaacggcaccatagaccaagactcctgcaatcaccgcaatcgttccgttgacctcaaagcgagatttaaaccatgcccagcgactttcaggatgacgaccggatggcaattttgcaaagatcatattggttgacaaggcacaaacaaagagtgctacagagatcatataaggagccattccgacaccattcaccgggacattgtcacggtctgttttagacaaagtgacaggatctgctaaggttttagcgttttctttttcagttgtagccacattcaattgtcccttagcatcgtttaatccttgactcaaggtttggcttcctgttgctaattcacctaaaccatttgtcaatgtttggccacctgctgctaatttgctggacccatctgagatttgatttgcaccgtcggctagtttatcagctccggtcaccagttgacctgatttttctgtcaactgattgacaccagtgacaagtttattgacaccacctgccaactctggagtcttgctgttcaattgtcctacaccgtcagctaattttccagcaccagcaaccaattcacccgacttacctgttaattgggtcgctcctgaagccagttgattcatacctgatgtcaaggcaggcatcttcccatttaactcatctagaccagaagccaattgattgcttcctgcaagtaattctgatgatttactatctagttgatcaacacctgctgctaactgactagccccatttgttaaagtactgctattcgtctgaagttgggttgctccattagcgattttatcgacaccagctgtataagctccgatcccttgattgatggtttgactagctggcaacaattgtccactaactgcggattgaatcttagacaagccacttgacaagtctgtcaaggtagaagaagctgtcggtaaaacttgattggctgccgtttgcagttgtgtcaagctatttcctgtattcaaactaccttggatcgtttgaatcgtagtcaagattccttgagccgccgtttcactcgagcttgggctcgatgagatcgctgcattgatttccgcttgttggtcagctgtcattgcttgataggctgctgtcccttgcacacttgcaagggcatttgcacgatccgcttgggctgaagcaaggattgattgagctgaattcgcaatactcgtcaatccagacgaaagttgactggtatctactgtagcattttgaatcgctgcatttaattggtttaaacctgctgccaattgatcaatctgagcggattgacttgtagaagcttgtagctggcttgataatgtttgaatacctgattctaattgtgaaaccccatttcgaagggtagcagattgactacttaattgacccgctccctctgataaagtagcgactccatttgtataggttgctaaaccatttgaaaagtttgacaggcctgaattcaattgacgcacaccattggtataattcccaagaccatcattgagggtccccataccgctggttaactgaccaactcctgaggccaactgaggggtttgactcgccatttgattgagaccatttcctaatcgatccactccggtagcgtaagccatcaagcctgtattaaaagtaccaaacccattatttaattgattgacgccagataccaagtttggaagttgaccagccatttgattgagaccatttcctaattgaccaacaccatctgtataggctgctagacccgtacgaagagtagtcgcaccatctgaaaatgctaagcttgaacgagccaatgtattcaaattagtagacagtgtttgaccaccatcttccaatttacttgcaccatctgctaatttagcacttccatctgccgctgtccccataccagatttaagcgatcccattttggaaaataaagctgttgtatacgtattggtcactttttcggccactgactgcttcatctttgtcatcgcagtgtcgctcattttccctgcgataaaactatgaccactggatgtttggtaatcaatggtcatctgttccggatgattggttaagatggagctagctttctttgaaagatcctcaggcagggttacaatcatataataatcgccatttttgagaccatctttcgcagctttctcatctacaaaatgaaaatcaagtgagtcattgtccttcaaattggacaccatgtcttttcctatttccatcttttgtccattatatgtagcagattgatccttattgacaaccgctacaggaagatccgaaacttggccatatggatcccacatggaagatagaaaaataatattataaagagctggaatcaaagcaactccaatcatgacaatgataaatgttggctttttaagaatagccttccattctttcatcatattttttgtctcctttttatacacattgtctaaatttctgatataatagattatacagtttctagaaattttcacaagtaggaaatctttatttttagacactgtgtataattttgtgcaaaaaggattaacagatgactgagagcaataaacgattaaaaacaaaacgaaatatcgaggaggcgatggttcgactactagaaaaggaatcattcgaccaaatcacaacggttgagttagcacaagaatccggcattagtcgctctagcttttatacccactatcgagacaagtacgatatgatcgagcgctaccaacaagcactctttcacaagcttgaatatatctttgacaaacaccaagacgacaagcgccaagcgattacagaagtgttcgaattcctaaccaaggaaccactctttgcagttcttctgacagagaatggaaccaaagagatccaaaccttcttacgacataaattacagattcttctggttgatagtttgcaagagcgctatagtcataaatcattaacagatattgaaagagtctacagttctgtctatctgaccaatgccttcttcggagtctgtcagatgtgggtttcgcgcggaaaaaaagaaagtcctcaacaaatggctgaatttttaatgaaaatgttacggtaacagtctctcctgatcgatctagatcaggagtttttttattagcaggtttaggttttaagaaaacaaaaaggggagcaaagccagaaatcaaccctttaagacaaaataaaaagcccactgtagtaggctttctgcaaagtatatcttaaaattaaagcattttgttgtagaattcaacgacaagtgcttcgttgatttctgggttgatttcatcgcgttctggaaggcgagtcaatgaaccttcaagtttgtcagcatcgaatgatacgaatgctggacgtccaactgtagcttcaacagcttcaaggatagctggaaccttagctgatttttcgcgaactgagatcacttgacctggagttacgcggtatgaagggatatcaacgcgttttccgtcaacaaggatgtgaccgtggttaacgaattgacgagcttgacgacgagtagtcgcaagtccaagacggtaaacaacgttatccaaacgacgttctaaaagaagcatgaagttgaaaccgacagttccttctttaactttagtagcttgtacgaacaagttacggaattgtttttcaccaagtccgtaagagaaacgaagtttttgtttttcagctaattgcaaaccgtattctgacaattttgaacggttgtttggtccgtgttgacctggtacgtagttacgacgtgccaattctttacctgtacctgtaagtgacaagccaagacggcgagattgtttccaagatggtcctgtataacgtgacatttgaaatgtcctcctataaaaataatttttgtaggaaataacgttttagacaaacctgattcgttcagaaagccttcgcccaaacagcaaaggttacttttctagctgacttcctgttgacgagcttcattttgtcctgctgtcatttcgcacaaattctattctatcacggaatagaaactttgtaaagtccttcaaaacaatttcaatgaaattcagacaataattctatgattcgttttttatattgcaattgttgccagtctctatccgttgctggatcccattttaaaggaagatctgcaataatttcaccgggattatgatttaagatatagatccggtcactcaatgtcaaagcttcttcgatactatgagtgatcactagagtggtgagaccaagacgttccttactgtctagataccagtgataaagatcctgccttgtcaattcatctaaggcactaaaagcttcatctaataggaagacagaatgacccagaagataggttctcaatagcgccacccgttgccgcatccccccactcagggcattgggataaaggttggcaatacttcccaatttaaattcatctaacaattttagagctgtagatgttgcctcttccttaggaatcttttttaattgaaggggaagaataatatttcccaatactgtcttatgttctaacaaaagatccttttgtagcatatagctgacttttccaaaggagatcggggcatcatctacttctatagcgcccttttgtaagggaaagatcccagcaattaaattaaacaaggttgatttccctaccccacttggacctagaatagagacgatttctcctttttgcacttctagtgatacattgtttaaaactgctttatctccaaaagagaaacttacatcttttacggttaaaatatcagtcacctaccaattcatttgtaaaacctttgtcttctaagtcatttgaaaccaatccttgctcttttgcccaagcataaaaagcattccaacgcttggagtcaaactgcccccatttatccttgtctgaagcatattgactggaaagatatttttgagaagctagtacaaaatcacgctggttagccaaagcaggggcctgtttaatcaagatatctgctgcttcttctggatgctctatagcatattggtagccttttttcaccgcttgaatgaatttctttgcttcctctttatgagacttcaaatagtcattgttagcaataataacaggcgaatagtagtcaaatgcaggaacaaaatctttcatatagaagaaattggtcttcattcccttttgctcagccaaaattccatcccaaccgtgataaatccaagcagcatcaaagaccttattttcaatcggagtaatggaatttgaatcactatttggaaccaattttacttgattaaaatcagccccctcttttttcatcatcgatttgatcatttccaactcaatcggatcattccaggtaccatacttcttaccaaccaaatcttttggacttgtgatcgctgcatcttttcttgaaataatccctgacgtattgtgttcgacgatagctgcaacagcggtaatccccgcacctttatccaatttcttggccatagaatcttggaaataaataccaaatggagctttcccattaataatcaaatcagaactactgtcttccggcggaagttttatatctacatccagtcctgcatctttaaaataccctttttcctttgctacatagagacccgtatgattggtattcggggtccaatctagaataaaatcaatctttttcaaaccacttgacgattgcttgacagaattttgacaagcactcaagaaaacaaatcccaatattattgagaaaaataaacctattgactttttcattagctatacctcttttacatttttgtcaatttaatttttacaccatttacaagtttgtcaatcctttttccattttagaatggttcgttctaattggtcaacgagaaacataccgagtaaactaatagcagaaatcaatacaatgatcgcaaacatcgtatcatactgaaataacttcttcgattggatcatatagacccccaatccatcaaaacctcctaaccattctgaaactaccgtactgataaaagcataggaaacgctcacacgtaaacctgcaaaaaaataaggaagcgctgcaggaattttataatgagctaaggtctgaaagcgattggcttgcataatctgaaacaatctcagaatatcttgatcgcaatgccgaaaaccatctaacagactgactacgatgggaaataccaccgtaataatgatcaaaaccagttttggaagcataccataaccaaaccaaagaaccaggataggggccaaggcaatcgtcggaatggtttgaataacaaccataaaaggatagaccagatcattcacccattgaaaactatccatgagaatcgcaaatccagcagcaagaagaacccctataacaagtccaatcaaggccacttgaagggtagacaaactgtgatgaatcaggagagctcgatctcgtacaaaggcattcccaatttcaagtggcgttggtaatacaaatttggggaggatatttaaaaatcctgctaactgccataagacaagaagactgctaaaacctgcaaatcctatcaattgttttgaatatctttttacaagagacatcgtaacctcctttctcacaaataaaaaacgcctccaaaataggagacggattgcacaaggtcactcataacgaaaaatacatttcatttgtttcctacgctggcattacccagatcaggtgcggtcgaagcttacacttcctctcagactgtacacagactcccatatgtatttattataataactgatttagacgataaaagcaagaaattaatccaaataacgaattaaattcttctctgttaaaatatctgaataggtgtaagactccacgtatgtattggctggttcacctggtaagctgttgtcgttcgtatactcgataataaataaagaaggatagacctcaatcaagcgtccaaatttatttttttgacgtttccgtccattttcaagcgtcatttcaaccacttgtccttcatgagccttgatctcttctttaatttttttcatttttgcaacatctgtaaatgcatcactcatcttattgatcctctctctttgaaatacttgagaatttattgtattccttttggaatattaattcgactgtcccacgcgcacctgaacggtttttctcgataatcacttcaaccgtattattaggcattccatcttcttcctcttcaccagctcgatcataataatcatcacggtacaagaaagcaacaatatccgcatcctgctcaatcgatccagattcacgaatatcagaaagaacaggacgtttgtcttggcgctgttccacaccacgtgatagctgactcaaagcaataacgggaacttttagttccttagccaaaatctttaactgacgagaaatttctgaaacttcctgttgacggttttctcttccagtccctgtaatcagctgcaggtagtcaatcagaataagaccgagattgcctgtttcctgcgctaattttcttgctctcgaacgaatctcagtgatccgaatccctggagtatcatcgatgtaaatactcgcattggccaaattcccttgagcaatggcatattttcgccactcttcatccgtcaattgacctgtacgaatcgaatgggattcaatcaagccttcagctgctaacatccggtcaaccaagctttcagcacccatttctaatgagaaaatagctactgtcttatccaactttgtcccgatattttgagcaatatttagagcaaaggctgttttccctactgcaggacgagccgctaaaataatcaactcttcctcatgtagccctgtcgtcatatggtccaaatcgcgatagcctgtcgcaatacccgtaatatcagaggtttgaagcgagcgggcttccaagctaccaaaatttatattcaagatgtctcgaatatttttaaatccactacgatttgcgttttcactaacatcaatcagagctttttcagcacccgcaatgatttcatctgaaggacttgcaccatcataagcttgattaatactttccgttaatcgagagatcaatcgacgtaagacagctttttcggcaacaatcttcgcgtaatactccgcgttagctgaagttggtaccgaattaatgacttctaccaaataggagagaccgccaatattttggagatccccctgactatctaaaatatttcgaacagtcgtcgcatcaatcgcatctccgcggtcagctagatcgatcatggctttaaaaatcaaacggtgcgagtacttaaagaaatcgcccggctcgatatattcacgaacaaagaccaatttcccctcatcaataaagatggctcccaacactgattgctccgcttggatatcctgaggttgtgttcgtaattcctctatctcagccataaaaaaacctttctatcgatcgtgtttacccttcgtttacacgaatattaatcacacctgtaacatcttgataaatttttacagggacgtcaatcaaacctgttgaacgaattggagaggaaacttggatatgacgtttatcaattttaatgccaaattgtttctcaagctcttctgcaatctttttattggtaatagagccgaaagtacggccatctggcccaattttttcagtgaattgaacaactgttgcttcttcttctaatttcgctttaatcttttgcgcttccgctaacaattcagcatgcgctttttcttctgacttttgctttccacgaagttcaccgattgcttgggcattggcttctttcgcaagatttttcttgatcaaaaagttttgtgcataaccagtaggcacttctttaatttcgccttttttacctttaccttttacatccgctaagaaaataactttcattctacattctccttttcatatagttacttcgttttcaatcgtctcaatcagttgttgacgaatactcatcaaatcttgaccctcaatttgagaagctgccgaattgaaatgacctcctccgccaagctgttccatgatacgctgtacattgactttgcttcgacttcgtgcagaaatagagacagtcccactttgattacaagcaatgacaaaggttgcttccacctcagacatggctagcatactatcagctgctttactaatagttactgaatcataggctttagtcgtattggcacaagctacgatgatatgtggcaaaatcttttcaccagtcaagatcagttcgttcacttcacgatactcatcaaactgaatcgcagagatctcctggatggctacactatcactacctcttgagcgaaggtaactcgccacatcaaaggtccgacttgtaacacgtgcggagaagttcttagtatccagcatgatcccagccatcaagacactagcttgaatcttcgtcaaccgatttttcttcgacttctggaactgaataagttcactaaccaattcgctcgcgctacttgctccactttcaatataggtgatcagaacattttcagggaaatcatcatcccgacggtgatggtcaatgacaataatctgttgaaatttctgataaaattctttagaaagggtcaaagctgtcttagaatggtcaaccataattaacaaagagcgatccgtcaccatttgcatggcttcctctaggggaaggattttcgttacctgctcttcttctagtttcgcaattgctcttgaaatatcactagccattgcatgcgggtcatagaccacataagaggaagccaaaatattgctagagaaaaactgcattcccacagacgctcctaaagcgtccatatccaagtttctatgcccaacaatgaaaacttgatcaacggatttaaccttatccgaaatagctgtcatcatagcgcgtgtgcgagtccgagtccgcttcacagccgaagctgttcccccaccaaagaaaatagggtttttctgttcatcattttctttgacaaccgcttgatccccaccacgaacttccgcaaggtttaggttcaagagagccactttaccaatctcatcatgctccccgtcaccatacgagaatcccatacttaaggtaataggtagctcacgatttttagcttcctcacggaattgatcgatgacagaaaattttgattccatcaactgttctaagaccgtgtagtctgtaaacaaatagaaacgatccatccccacacgtctgtaaaacatatggtaatgagctgtaaactcttctacaaagttggcaataaaactattgatattgctaatatcagagtctgaaatgacatcttctagatcatcatagttatcaacagaaataataccgataacgggacgagttgtcaccaatcccacagttgcttcatactcacttgaaacatcaaaaaagtaaacaacactagacgtctgatcaaagtaaacagaatatttcttatcggctacagtgacataatgacctttatcctcaaacagagtattgagtaactttttcaaggattcaacatcaaagtccccatcatctgttgaaaaaatcaattcagcataagggttgaaccactctacttcatttgactcttcattaattttgataactccaacaggcattttatcaaggagggatgctaatccgctttctgcctgatggttaacatattgtatttgttctaattcatctaactctgaaatttgtaactggtattcaaataaagcaatcaatccagctaagactaaaaaaattgcaatgagagttacatagcctttgccaaagattcttaaaaaaattgctaaaattgcaaatgaaataaaaccaattaacacataatggatgaacgataaacgaaattttttcatcataaacctcttctcggaattataccataaatagaggtaaaaagcgaggtttctctctatattacagagaagatcgacctgtaaaagctcttcctcggcttcactactttgtaaacaacgtttacaactgtgtaaacagcaacaacagatttcaatccataaaattgaggctgaaacatcatctcagcctcatttgattagtggtttgctttgtttttggagatactccgagatttaccttccaagtaaaccattaaaatagagatatccgctggattgacacctgagatacgacttgcttgaccaatcgtttctggattaattaatttaaatttttgacgcgcttcggttgcgatggagtcaatatcatcccagtcaatattggcaggaattcgtttttcttccatacgcttcattttttcgacttggtccattgcttttgaaatatagccttcgtatttaatttcagtttcaatcaattcaatgattttatcatccagttcttcagctgcaggaccgataaattctaccacatcttggtaagagacttctggtcgtcgcaagaattctttagcagtgacagcatctgtcaatggtttaaagcccattgcagcaaccttctcattggtttcctttacaggctttaacttaatgctatccaaacgcttcatctcgttttcaaactgatacttcttggtttcgaaacgttgccaacgttcatcatctaccaatccaattgctcgtcccatttctgtcaagcgcatatcggcattatcatgacgcaaaatcaaacggtattctgcacggcttgttaacaaacggtacggttcgatcgttccctttgttaccaaatcatcgatcatgaccccaatataaccatcactgcgtttcaaaatgagttctggttttccttggatttttagagccgcattgatccctgcaataatcccttgaccagcggcctcctcatagccagacgttccattggtttggccagctgtaaagagacctgaaattttcttggtttccaaagttgcgcgcaattgatgaggcaaaaccatatcatactcaattgcataacccgttcgcatcatttctgacttctcaagtcccttaatagaatggacgagatcccgttgaacatcctctggtaaactcgttgacagcccttgaacatagacttcttctgtatttcgtccctcaggttctaaaaatagttgatgacgctctttgtcagcaaaacggacaattttatcctcaatggatggacaatagcgaggacctactccctttacaacccctgtaaacataggagcccggtgtaaattattctggataatttcatggctatgcccattcgtgtaagtcaaccaacaaggaacctgatcctttacataatcttcatcacgcgatgtataagaaaaatgatttggagcttcatctccaggttgaatttccgtttcgtcatagttaattgacgatgcctttacacgaggtggcgtccctgttttgaaacgtccaatttctaatcctagctgtttgagattatcggccaaattgatagaagctagactatgattaggtcctgacgaatacttgagatctccaatgataatttctccgcgtaaagctgtcccagtagtgacaataacagcctttgccccatactcttggtgagtcgcagtccttacaccaacaaccttaccattctccaccaaaatctcatcaatcatagtttggcgaagagttaaattttcttggttttcaaccgttttccgcatttcttttgagtaaagttctttgtctgcttgagcccgaagtgcacgaaccgcaggacctttaccagtattgagcattttcatttggatgtaggtcttgtcgatattcttcgccatttctccaccgagggcatcgacttcacgcacgacaattcccttagcagaaccaccaatagagggattacaaggcataaaagccagcatttcaatgttaatagtcgcaagtaagaccttacaacccatacggctagcagctagagaggcttctactcccgcatgccccgcaccgattacaatgatatcgtattcttctataaagttataattcattctatttctcctatttctcaagatggatgtgtcgtaattttccgtcccagtctggtagggctgattttaaaaaagccggtttcaggtcaacagtatgtaaatcatctaaagcaatccaacgacaaggtaattgctttgtatcttcctgcatgaccaaaggtgcatcttccagcaagtccacaaaataatgaaattcaatgttatggtagtggattccagcttgttcaaagtgattttcaaccacgaaagctaacggacctactgtagatgtaacaccaagttcctctttgacttcccgaactacagcatcttctgtagtttcattgacttgaatagcacctccgattgtataacagccgtcctcatcttctatgacgaacaagcgattatcttttacaatcaaagcagtcgctctcacaccaaaaacagtagaacctattttcgtccgaaaatcctgttgcctcattttacttcctttcgaaatcacacaaaaatagtcaaaactctgagaagtgcaggacaaaaaagcctacaacatccatgagctttgaccatcatgactattgttaaagttattttatcaaatcaaatcgttttgtcaatgcaaattactgtttgagcaaggtctgcacactgacgataatcatctgtattcctatcgagaatagtaaaagtcccatcattttcgttataattttcatcaaattttctcccaagaagcctgcaatttgttttgcacttcttaacaggagataagtgatgacacatagtagagcaaaagcaactacggttatcagttgattctgcaaacctccattagccaaacttaaagcagttgtaattgtacctggtcccgcaaaaagtggcattgcaagaggagaaatagcaatagacattggatctgaatttactgcttgctgctccattcctttatagctaggtgaatgattaccattaatcatatggtaaccgataacagccactaatattccgccagcaattctgaaagaaacaattgtaattccaaatactttaaaaatgaaatctcctgaaaagataaaaacagttataataacaaaggcaatcaaaagactcctaaaagcaatttttcgtgaaattttttgactatcatctgctactaaagccatgtaagcaggaagatttgaaattgggttcattatagcgaaaaatgccataaatgcataaaaaaattgtgaactcatcgtttttactcaactccagttagatatactgacaaacttttccgtctttatacgcttggtcaataataccgccacccaaacattcctgaccatcatagaaaacaacggcttgaccaggtgtaatagcacgctgaggttcagcaaaaacaacctctgctttatcacctttaacctttacagtaactttactatcaggttgacgataacggaattttgctgtacattccatttcaaattcttctggcatatctcgagtaaagtgaatcattgaagcgtcaagagaagttgacatcaacgactcatggtggaaaccttgacccacgtaaagagtatttttagaaagatcttttcctactacaaaccatggagcattatctccacctttttggccaccaatacccataccaccacgttgaccaatggtataatacatgagtccgttgtgttcacccatatcacgaccatcgacagtcatcatacgacctttttgagctggtaagtattgactaagaaactctttaaagtttttctcaccaataaaacatattcctgttgaatcttttttcttggctgttgcaagacctgcacgttcagcaatctcacgaacttctgacttttgtagatgtcctaaaggaaacatcgttttctgcaactgctcttgcgaaagttgactaaggaagtaggtttgatctttattgttatctgcaccacgcaacatatgaacaatgccgtcttcatcgcgaacaacttgagcgtaatgtcctgtagctacataatctgctcccaatgtcatcgcataatctaagaaggccttaaacttgatttccttattacacataacatctggattaggggtacggcctgcacggtactctgctaagaaatattcaaagacacgatcccagtattctttctcaaagttgacagaatagtaaggaatgccaatttggtctgcgaccgctgctacatctttgtaatcttctgtagctgtacagacgccattttcgtctgtgtcgtcccagtttttcatgaagatgccgatgacatcgtaaccctgttgctttaataataaagctgttacagatgaatccacaccaccactcataccaacaacaacacgtgttttcgagttatcactcatagatttctcccatcttttcgtttctcacgattgaaggtcgtggtttgcttcaacgattgaaggtcgttttgagcagttaccattttaacacgctttatattagaaaacaagcatcttactattctttttgttgatcaggatcgatgggtttacaagtctgtaaattaaaaaagagtcctattcaagaactcttttcatacgaatttaataccagccatttgccaaccagaaatttttagctgctgaccatgatccataacggttgacaacatattgattggccactttttcttggtttgcaggtgataaatcaccattcaaataagtgatagtcaattggtaacgaccataatattggccattttgtgctgtataactaccacttgactctttttgggcaatccattccttggcagctgcatcttccgcactcaagccatctgaagcagagacagtagttgttgcttgtgtagtatccgttttactagcaggagcttgctccgtggttttctgcgttgtatttgcatcttcaatttcaagaacttgaccaactgagatgagattcacgttactaatcttatttttcttagcaattgcatcaaccgttgtgttcttctctttagcaatagctgataaagtatcacctgattttacagtataagaatctgcattcgctacaattggaaggaaaagtcctgcaagtaaactaagtccaataattcgtttcatcatttgttttttattcattattatatactcctttattggtatacctctatactacacaagaaatatttcatatttattgaaataatgtgtcaaatatttcagtcagatgttagaaatactaaaaatccaggataatataaatgctttaagccccctttaagatttctcagatatttcgggaaaaatagaagaaatcatcagccatatctgatataatgaagtaaagtgatcacaaaggagcagagcatgaactctttaaaattccaatcagtttttgatattattggacctgtgatgatcggcccatccagtagtcacactgcaggcgctgttcgaattggtaaaattgtttcttctatctttggagaggaaccaaaagaagttgagttccaattatttaattccttcgccaaaacctatcgtggtcatggaacagatttagccttagtagcgggcatcttaggaatggacacagatgatcctagaatcccagatagtctaaaaattgcacatgaacgaggcattcggattatttggtctattcaaaaagaaagcaatgctcctcacccaaacacaacgactattactgttaaaaatgatcataaaacgatttctgtcactggaatctcaattggtggtgggaacatacaggttactgagttaaatggctttgctatctcgctaaatatgaatactccaaccattatcattgttcaccaggacgtccctggaatgatcgctcatgtgacagaagctctttctcgctatgatattaacattgcacaaatgaatgtgacgcgggaaaaagctggagaaaaagcgattatgattatagaagttgactcaaggagttgtgaagtagcgatcgaagatatccgtaaaattcctcatcttcataatgtcaactttttcaaataaggagttcatatgttttattcaattgtagacctcgtagaacaagcaagcacgcaataccaaggaaacgtcgcagagttaatgattgcaactgaatttgaactaactggtcgtgaacgagaagaagtcctacgattaatgacccgtaatttagaagtgatgattgattctgtaaagttaggattaaatgaaaaccactctcgtagtgggttaaccggtggggatgccgcaaaattagatcgctatatcaaatcaggaaaaacgttatctgacttgaccgtcctaaccgcagcgaagaatgctattgctgtcaacgaacacaatgctaagatgggactggtctgcgcaacacccactgcaggatctgctggctgcctccccgcagttctcactgcagcaactcaaaaattagggttaaaccgtcagcaacaattagattttctactgacagctggagcttttggtttagtcatcgcaaataatgcttctatttcaggtgcagaaggtggttgtcaagcagaagtcggttctgcttcagctatgagtgcggctgcattgacactagctgctgggggaactccttatcaagcgagtcaggcagtctgttttgtcatcaaaaacatgcttggcctcatttgtgatccagtagcaggactcgtggaagttccatgtgtcaaacgaaacgcaatgggagctagctatgccttcattgctgctgatatggccttagcaggtattgaatcaaaaatacctgttgatgaagtgattgacgccatgtatcaagttggatctagtcttccgactgcctttagagaaacagctgaaggaggattggcagcaacaccaaccggacgtagattacaaaaagagatatttggagaatagcatgcaagccttgttttttgatttagatggaacattagttgacagttccaagggaattacagagagctttcaacatacattcgatactttgaaggttcctcaacccgatctcaaaaccatccgtagttttatgggaccacctttgatttctagttttgaagctacccttccggaaactttagtagatcaagcagtgacgatctatcgccagtattatcataaaaaaggtcaatacaaatcaactctgtttcctcagatagtagaagctttgaaagcattacaagacgaaaacattcctctttatgtaaccacttcaaaacatgaaccagttgctttacagatgtgtcaagatttaggtatcgataaatactttaaaggaatttatggatcaaattcagatcgtatccacaaagctgatgtcattcgatacgccttgtcaatcaatgaccttccaaaagaggagacagtgattattggagatacaaaatttgacctcattggaggtcaagcagttggcataaaaaccatggccgtcacttggggatttggagatcttgaagatctacttctctactcaccagattttatttgtcactctccacttgatattcttgagacattaaaaaaataggtttacaaattgtaaacctattttttaataaccccaagctgataaaccttgtgagctatatgcattgtatgcagcctggatttgatcatcaactgttgcagttgaaccccaacctggcattgtttggaacaagccactggcaccagaagcatttgctgcatttacttgaccatttgattcacgggcaataattgcttcccaagtagaagcaggtacaccagtcatttcagccatacgagcagctgcataagatccttgttccccagcagtattcccatttgatagaacaattccaccatttgttgattgtgcagaagtcactgcagcatttgctgcataagttgtttgtttttgagcagtttgtgctgttgcagttgctgtaggtgcactttcagcaggttttgcttgctcttgtggagcaactttatcaatcatagatttagaacgctcacctaactcaataatttgtcctgcatagatcaaatcttcattagtcagattgttagatgcaataatattttctactgaagtgttattttctagtgcaatttttgatagagtatctccagacttcacttcgtaagtttcagcattcactgtagcaataccagaaatgaaaagtgatgctgctgaaagtagggaagtgactgtccattggaactttttactgttcatgaattctattctcctttcgaacataattctatcatacacacaaaatgttacagtttattgtagaatatattacaaatgttacaagaatatgtgaatttaatgtaaaaagcgctttgtatagcgctttttccttatttttgaaccaatacaactagctctatccattttttagataaaaaactatcaacatgagacacagaataacgagcaatgctagggtatcttttactccccactgcagagtccgatagcgtgttcgtccctcaccgcctttgtaccctctcgcttccatcgcaattgctaatgcatctgcgcgtttaaaactagaagcaaatagaggaatgaggatcggaataaaggaacggatcctttttaatagatttccttcaccaaaatcaacaccacgcgccctttgcgcattcatgattcgattcgtatcatctactaaggttggaacaaagcgcaaactcatagatagcattaacccaatctcatgagccggaaccttaataatttttagtggtgtaaggatcttttcaacagcatctgctaaactcaatggtgtcgtcgtcactgttaaaatcgtcgaataaaaaataattaaaataaatctacaaaatatgatggcggcttgcatcaatccttggtcggttaatttaaaaaaccaccattgatacaaaatagttccttgagaggtcgcaaataattgaaaaatagttgtaaaagcaatgataaaaatcattgattttaagcctttaatataaaaactaaccgaaatcctcgttagatacattaaaacaaaaataaaaccaaagagaagaacatttgtctggatattatttgcccaaaacagaagaaatatgaataaaaacattgagagcaacttcccacgaggatctagttggtggataatggagtttccaggaatataccttcccaaaatcatattattcatgaagtaacagctcctttagttcctcaattttgattggtagtctgtccagggaaagtcctcttcgtttcaattgaagagcaaaattcgtaatttgtgggactcctaattgaagtttttgtaaatactcaacctgttgaaatacttccctgggggatccgtttaggacaagttttcccgcttctaaagcaaatacggtatcagcaaaatttgctacatcatccatcgtatgagttaccagaactagggtcatcccatttttatgtaatgtctcaaacagtgccatcaattcctttcttccagcaggatctagccctgctgtcggctcgtccaatactaaaatctctggttcgatagctaaaatacccgcgatcgcaactcgcctcatttgtccaccagatagttcaaatggacttttatcatagatagactcttctaaaccaacgatcgctaatttttctttggctatttcctccgctttgtccttaggtaccccaaaattctgtggtccaaaggctacatcagctagaacggtttccgcaaatagctgactttctggaaattgaaaaaccaaaccgactttttttctcaggtacttcatttcttttggctcagaatgattatctaaaacaaaatcttcaaattgaatcgttcctgtagtcggacgcagtaaaccatttagtaattgcaacaaagtagacttgccactaccagtatgcccgatgatggctgtataagatccattttttatttccaaactaatatcagaaagcgcctgcccttcaaaaggacttccctcttgataagtataatagacattctttaaagagattcccatagttggtctaataactcactttctgttagataatcctgttttagcggaaaatgtgagctgagagattcttgaacctgcttactaaaaggcttatctaatccaatctcattcagatcatttcttgaaaacaattcccgcggtgtcatagaagactctagttttcctttttgaaagacgagtgttcgatcacttaaggcaatttcggttaaatcatgggtaatagaaataattgttaattgaaactttttctgaagttctctcattaccgccattagatcctctctaccttctggatctaacatactagttgcttcatcaaggataataatagttggtctcaaggcgataatacctgctatggccacccgttgcttttgaccacctgacaaacgagatggttcgcgatctttaaactccagcataccgacttgctcaatagccttctccacacgttgaagcatttcttcccgtggaattccttgattttctaaaccaaaggcaacatcatcttctactgtcgcaccaacaaattggttgtcaggattctgaaatacaatcccaattttactacggatttcccatatggtttcacgagtcagttgttttccatcaacgtaaatctcaccagactcagcttccaaaaggccatcaatcaggcgtacaactgtagatttcccactaccattgtgtccaacaatcgaaagccactctccttgtttcacgtgaaacgaaaccgtgtcaatttgatactcttctactgttttatcgtatcgaaaggatacattttttagctcaatcatctgtttcatttatttaaatgtgtctttaaagagatagctacttcccttaaagtagtcgtaaccagaataaattgtgaaaatcaatgcaatataaagcaacacttgccccggaagtgtccaatggcaaagcaaaaagataatggcaaacatttggctaaaggttttaatttttcctggcatggctgcagcaagaactgtaccacctgtctcaacaagtagaagacgcaaaccagtaacagctaactcacgacaaatgataacggctgcaatccaagcaggaaccatttttaattcaatcatcatgataaaggctgacatgaccaataatttatctgccattggatcggcaaatttaccaaaattactaactacattccattttcgtgcaagaaagccatctaaataatctgtaatactagcaattgcaaaaataactgccgctacaatatgtcctaagtaagagtgacttaaacttaaaatggcaataaaaataggaatcatcacaacccgaaataatgtcaatgcattaggaatattttcttttttcatacttcctccaaaaaataaactatctttacatctattttacagatgctgtaaactcataaaaatatacgatataaatcacaaagccaagaatggcaaaactaactagtagataatacaggattggtaaccagctcgctttctgtcttacttttcttgaatgaagctcttcgtcatctacaagtatttcttcatcaaataacaattcttttccttcgcgaaaagctgtcaataggatggactcatctaatcccaaagcccatgctaactttttaagatagatctgagcgtaaaagggactcggtaatagatcaaactcatcgttttccaacgcttctatataaggaatttcaatggctgtcttatttgacacatcctgtaaacttaagtgtaaatttactcttgacagttttaacacttgaccaatcgttctcttcttcatgttttcccttcttgatacattgtttactacttttgaaaaatcatataatcaaccatctcagcctggtcgatgaactgacgccctaatttgatgatatcttgtaaactaataccttgtaaaatctttggaagatcataagaagtgctaccgtctgaaaaatattcaaactgagtggcactatactcaagcgaatttaaaccttgtaagaaatcaccaaacatttcgcttttaatcgtatccaaatgttcttgattcacatctggatccttctcaaattgtttgatcgctgacctaaattgatgagataaggacaccggttcttgagtatccattgtcaaaataacgaaatgaaataattcctcaacctcgacttcaagtgtcaatgagttgtcaattttcccagcttcatataaactttgaaaccgttgcgaagtccaaccaaacatcatcgaaaatagtaatttcaacatcaatttataacgaaatttttcctcttccttaatgatatcatttcctcgaattccaattgccaacttaggagtagcaacttccattctacaagattgattcaattttacttcatttttttctacaggaaaacgttctaactccacagatggatgaggaggaactagatcatatttctttactacttgcaatacttcatcaacatcaaagtttccgatcactaataagtgcatttgagagggatgatagaatagatcaaagttttcacggagattatctattgtaatgtcagaaatagactccctagtcccagcaatatcatctgctaacggtgttccaggatataaattttctaaagcaccaaaaaataatcgatagtctggactatcttggtacattccaatttcttgttgaatgatttctctttccttagatacagatttttctgtaaaggaaacctttgaaaccatctccaataacaattgaatattttcagggacctttgaagttgttgagaaaagataacttgtctttgtaaagcttgtaaaggcattactttccgatcctaaatgaacgaatttttttaaataatcttgaccattttcatcttcaaatactttgtgttctagaaaatgagcaattcctgcaggatattgcctttcatgaccattcactagaattcgtgtatccactgagccaaacttagttgtgattattccataggtttcataataatcttctttgggaattaaatgaatagtcaacccatttgacaagcgtgtaaagtaaacttgctcaccaactgattcataatatttttctttaattttcaatctttacactactttccttccataaaataaacagactgtaaattaattgtttttgccacttcaataatttcttctctactaaccttatcgatggattctaaccactcttctaaagaaaggactttcgttcctaggatcgttttcagatattccctttcaatcaaggtattttgccgatcctgtgctaataaggtcgtattcaccaacatttcttttgtcaattgaagctctgactctgtaaacttgcctcgttttaaatcattcaactgtctcataatcaaggtcattactttcgtacgagattccttatcaatgcctgcaaaaactctcataaagcctgtaaaaatatcaaaatggctagagatggtataagcaagtccttctttctcacgaattatttgaaaaagtctcgaatgcgagaaagctcccagcatcccatttaatacaactagggggatatggagagattctccatactgggtagaaaaatgataacctaattctaaaatagattgttggttttgtttttgctctaacttttctctaacaacatttgtaaaaggttgttgatagttgacagacaaattgttatcacgtggcttgaattcaaactggttcactcgatccacaatagcgacctcattaaaatcgcctatgaaaaagaagtcaatgttatctaattggagcatctgatgaaactgttcaagagaactttgagctgtctcttgtctcgctaaatcaactttccccaatcttgacatcccgattgtttcgtcttcaaaaaatagttgattcaattgcccatgtgcataataataaggctcttcaatttctgactccaaatcggaaatcgtatttttcttttcaacgtcaaatgtatcactgtcaaagtgatcttctactaccaaaggtgaaaagaagatagtttctataatgtccaaaacttcatcagtaagaacatttttcttgctcaaaaagtcatcgcgcacaaaggaaatattcaaatcaacataatgaacacgtcccctcttagagactgaggttgacaattctaccccgtatagactcgctaatttttcacggaataattgtgaagttggatatttttgatttgcagtttccatcatacaggctactaaaacacgcgcagccacggtattttcatctaatggcgatgaaaaacggaccttaattttattggttttaaatttttttgattgaagaaagtgaagattcacgccctttactaattccattttcatcctcgttctactcaatagtaactttcattataacacgaaatcacactaaaatcctaattcaaactgtgaaaaagctcctcaaatcactcaacattctctaccctagaaaaactaaaaatatggtataataacacgcaaagaggtgaactatgaattacaaattatttgatgactttattacattacaagcaatcttaaaagaactcggtattatacagagtggtggtgcaatcaaagcttttcttcaagaaaaagaagtctttgttaatggtgaattagaacaacggagaggccgtaaacttcgtgtcaatgatcaaattgacattcctgaactgagcatgactatcaccattcttgaaccttctcaagaagaaatagaagaacatcttaaagagaaggaagaaaaggaacgtgttgctaaacttgtcaagcaactcaatcaacaacaaaagaaacaaccgacaaagactaacaaaaaagaaaaagcaattcgctttcctggtatctcgtaatgtggttaaaacagttatccattcaacattttcgtaattatcaagaactagaagtcgagtttcatcctggattaaatattttcctaggtcaaaatgctcaaggaaagaccaatattctcgaatcaatttattttctagctttaaccagaagtcatcgaacacgaaatgatagagatctcatctattttgaatccaccgattttaaagtttctggtcaattgcaaagagaaactggtccccttccattagaaatttccttgacaccaaaaggttggataactaaggtaaatcatttgaaacaagccaaattatcgaactatattggccatatgaatgttgtccttttcgcacccgaagatttgcaactgatcaaaggatcacctgcagggcgtcgaaagtttattgacattgaattaggtcagatgaaacctctctacttatctgacttatctcaatacaaccatgtactgaaacaaagaaatagttatctaaaaaattcggaaaaaattgatgctacatttttggaggtcttagattcacaactagctagttttggaagtcgcgtcatccatcatcggcttgagtttattaaaaaattagaagctaaagcaaaagaaaaacatactcgactttctgacaacaaagaagacctatcaattcaatatcagtcaactgttttttctgaagaaggaaatgatatagaagagcagtttctctctatgttggaaaaaaaccgtcagaaggatatttttaggaaaacaacaagcattgggcctcacagggatgatttggcattttttatcaataatatgaatgctacctttggtagtcaaggccagcatcgaagtgttgttctctctctaaaattagcagaaattgaattaatggaagaaatcacaagagaaaagccgattttactacttgacgatgtcatgagcgaacttgacaattatcgtcaacttcaactacttgaaaccatctctaataatattcaaacatttattacaacgaccactctcgatcatttaaaagaactacctgaagagttgaaaattttcactgttcaagccggtcatatcaaaacagcatcttgacaatactgtcaagatgctgttatttttgtttacaaatgtgtaaatttattgtgccgagtagttaggagcctcgtttgtaatttgcacatcatgaggatggctttctttcaatccggcaccgctcatttcgacaaattgtgcatgatcatgtaaatcttgaatggttgctgcaccaacataacccatacctgaacggataccaccgatcatttggaagaccatatctgctacagaacctttataagcaacgcgtccttcaattccttcagggaccaatttattggcttcattgacagatccttggaagtaacggtcgctagaacctttcttcattgctgcaatagatcccataccacggtatgttttaaatttacgaccttggaagatttctgtttcacctggtgcttcatctgtacctgcaagcattgagccaagcataaccgcgtttccaccagctgctagtgctttgacaatatctcctgaatacttgataccaccatcagcaatgatcgtttttccatattcacgagctacagcggctgcgtcataaatagcagtcacttgaggaacaccaacccctgcaacaacacgagttgtacagattgatcctggaccaattccgaccttaactacgtctacccctgcatcaaataatgcacgagcaccttcagcggttgcaatatttcctgcaatcaaggtacgatctgggaagtgggcacgaatttctgcaatcttacgaagaacacccgcagaatgtccatgagcagtatcgatgacaattgcgtctgcaccagcttcaaaaagagcttctgcacgttcaaaagtatctgaagtaacccctacggcaccagctacaagcaaacgaccaaattcatccttagccgcatttgggaactcaataactttttcaatatctttgattgtaatcaagccagaaagacgaccattttcatctaccaatggtaatttttcaatacggtgctcttgtagaatgtgttcagctgtttccaaatcagttccaaccggtgcagtcaccaaattttcactcgtcatatgatttgaaatgggttgattgtaatcagaaataaaacgcaaatcccggtttgtaaggataccaactaatttacgattttcaagtgtttcaacaacaggaacaccactgattcggtatcgtcccatcaactcatctgcttctgcaattgtatgagacggagtcaaatagaacggatcaatgataaccccattttcagaacgttttactttgcgtacttcatctgcctgttgctcaattgacatgtttttatggatcacaccaagtccacccgcacgtgccatagcaattgccatttgactttcagtcaccgtatccatagcagcagtaatgattgggatattcaagcgtaaattacttgctaattgtgtacttaaatctgcatcattaggcaatacgtgactttctgctggaatcaaaagcacgtcatcgaatgtaaaccctttttttaaaaactttgtgtcccaattagacattagctggatcctcttttctttttatttgagcaaggctcgaatttttattgttaatatcataccattctatggcaatttgtcaatcatttattggtaaattatcaatgaacagtaagaaatgttcgcttttaatgaagtcgttttattttttaaaataggtaattcccatcgcagattttacttcatccagtgtttgagctgctacatttcgagcgcgctcacttcctttttcaagaatagagtagacctcacccatatcctttgcaaactcaagtcgtctttcacgaattggtcttaattcacgatctaaaatttctaaaagatatcgtttggtctttacatcaccaagtccaccacgttgataatgttctttcatttctgcaatttcagctacatcttctggacggccaaatacatccaggtaatgaaagaccatattgccttcgatttttcctggatcctctactttaatatgatcaggatcagtatacatactcatcacttttttctttaaagtatctgcatcatcagctaggtaaatgccattattcaatgatttagacatcttagcatttccgtctaaaccaggtaagcgccctgctgcttcattttcaggataaatcccttccggttccaccaaagtatctgtgttgtatgcatgattaaaggaacgaacaatctcacgagtttgttcaatcattggcttttgatcatttcctactggaacaaaatttgctttaaaagctgtgatatcggctgcttgtgaaatagggtataccaaaaatcctgttggaatactctcaccaaaacctttttgagaaatctcggtttttacagttgggtttctttcaagtcgcgccaaagatactagattcatgtaatacatggtcaattccgctaattcaggaatctgactttgaatgaaaatcgtaactttttcaggatctagtccagctgccagataatccaaagcaacattaccaatagattctacaatcgtttttggatcttttgcatggtctgtcaaagcttgctggtctgctaggaaaacaaacatattatactcgtctttattttgcaacaagacgcgattttttaaagaaccaacatagtggccgatatggagttttcctgtcggtctatctcctgtcagaatgatgggttttgtcatactcttctccttaatcgttatccctatcattatagcactttctagttgaaaatgttagtctatcctctatgtttgtaaggaattaacactttactaaactgtcaatttcgtttacatcattgtaaaaacaaattgacagtaaaaaagttgaattttcccctattttctagtaaaatgaagacattatagaaagaggagaaaatcattgcttacagtatcagacgtctcactacgttttagtgatcgaaaattgtttgacgatgtcaatatcaactttacagagggaaatacatacggtctcatcggtgccaacggtgctggaaagtcaacctttttaaaaattttagctggagatattgaaccaacaactggtcatatttctcttggccctgatgaacgtttgtctgttttgcgtcaaaatcactttgactacgaagatgagcgggtcatcgatgttgtcattatgggaaatgaaaagctctacaacattatgaaagagaaagatgctatctacatgaaagaagatttctctgatgaagatggtgtccgtgcagctgaacttgaaggtgaatttgccgaacttggtggatgggaagcagaaagtgaagcatctcaattgcttcaaaatctgaatatttcagaagaccttcattatcaaactatgagcgagttagccaatggggataaagtaaaagttctcttagctaaagccctttttggtaaaccagatgtccttcttttggacgagcctaccaatggattggatattcaatccattacctggttagaagattttctgattgattttgaaaatacggttatcgttgtatcccatgaccgccactttttgaataaagtctgcacccatatggcggatctcgactttggaaaaatcaaactttacgtcgggaactatgatttctggaaagaatcttctgaacttgcagcaaaattacaagcagatagaaatgcaaaagctgaagaaaaaattaaacaattacaagaatttgtcgcacgtttctcagccaacgcttcaaaatcaaaacaagcaacttcgcgtaaaaaaatgcttgacaagattgaacttgaagaaattgttccatctagtcggaagtacccattcatcaactttaaggcagaacgagaaattggtaacgatctcttgacagttgaaaatctttctgtcaagattgatggagaaaccatccttgacaatatcagctttatcttacgtcctggtgacaaaaccgcccttatcggacagaacgatattcaaacaaccgctttgatccgtgcattgatggatgatattgaatatgaaggaactgtcaagtggggagttacaactagtcggtcttatctaccaaaagacaacagtcgggattttgcaggtggtgaaagtattcttgattggcttcgtcaatttgcaagtaaagaagaagatgacaatactttccttcgtggtttcttaggacgtatgctcttttcgggtgacgaagttaacaagtctgtcaacgtcttgtcaggaggagaaaaagttcgtgtcatgttgtctaaattgatgctcctcaagtcaaatgttcttgtactggatgatccaaccaatcacttggatttggagtctatttcaagtttgaatgatggattgaagaattttaaagaatcgattatctttgccagccatgaccatgaattcattcaaacactcgccaaccatattatcgttctttcaaaaaacggcgtaatcgatcgtattgatgaaacctatgatgagtttcttgaaaatgaagaagttcaagcaaaagtgaaagaactttggagccaatcataaaaataaagagccctgaaatcattatttcaggctctttcagtagaaatatatgaataaaacaaagctaaaaacatccctttttatagtatcttctttcctgattccggctatcatgatgttctttatttacctctcacaaggaatctactggaacagtgatacatcccccttattaggagatggttatcatcagtatgtcatttttgataccacacttcgaaatattttacacgggacagatagcctattttacagttttcaaagtggattaggcattaatttctatgcactcagtagttattatctaggaagtttcttttctcctcttgtctacttctttaatgcacaatccatgccagatgctgtttacctcatcactcttcttaaatttggagctattggcttaagcacttatattagtttacatggaatgttttctaaaattcctagatccctggttcttaccctttcaacatcatttgctcttatgagctttgctatcagccaaattgaaataaaaacttggctagatgtttttatcctagcaccattaattctttatggattcaaaaaactcatttacaatgagggagagattctctactttatcagcttaaccagcttgtttatccaaaattattattttgggtttatgatgtctatttttcttattttatggtacttgacacaactgtcatgggacatcaaaggaattggaaaacgcttctttcattttgtgattgtatctcttttatcagttataacaagccttgtgatgttatttccaaccttcttagatttacgcactcatggagaaagtttttcaaaggttgacagtatctttacagaaaaaagttggtatcttgacgtatttgcaaaaaatttcattggaagttttgacactactaaatatggatcaattccaatgatctacgtgggattatttccacttcttttagcgattacctttttctttgtaaagtcgatcaagtttcacgtgaaactttcttactttatactcttgaccattcttattttgagttttcgttttcaattattagatctcctttggcaaggtatgcacgcgccgaatatgtttcttcatcgatactcttggatcttttctttgacgattattctgatggcaggagaagtactaaatcgaatagaggagatcacttggattcgttttagtcttgctaatttcctccttattctaggatttggagcaactgtcctttacagcagtcactataaatttttatatgctgtcaattttattgttacttttgaatttttaattgctttctatttggtctgtttagggtttatcctaaaaaagataccgcctagacttttctatctttcgatcctgtttttctccatctttgaattatcggtgaatagttattatcaaatggaaggaattgcgaatgaatgggtatttgcttctcggtcatcctacgaacgagacttaaaagccatccaatccttagtaaaagagaagacagactctaattatcggactgagattttacagccacaaacgggcaatgatagcatgaagtatggttataatggaatttctcaattttcatctgtacgaaatacggatgctagctcgacattggacaaactaggatttaaatctgaaggaaccaacctcaatcttcgataccaaaacaattctattttaatggatagtctatttggtgttcgctataatttaagccaacaacctgttcaaaaatttggatttaaagagattgcaaccaaaaatggagtctcactttcagaaaacgaatatgccttaccaatcgcctttctgtcagcaaaaccttataaaaatacttcctttacgaatttgacactggataatcagacacgattcatccatcaaatcacagatgaaaaatataaattttataagaaattaactattctctcgcctacttcacaaaatactacatcttcgttgcaaactgcaaaaattgaagaagatagtcatctatcctacgcaagtattcaatatgaagtaacggttcctgcccatagccaactatatgtcaatgttccaaatttacaattttcaaacgatgatcggaaagatattgaaatcagctacaatggacagacccaacgctataccattgataatgcctttccattcttttcgattggccattttgacacagaggaaacgattactattcgtatgagttttccagaaaattcgacggtctcctttcagacgccagaattttttgctctggatttcgaccaatatacacaagctatcaccagcattcgtcagcaagaagttgctattcacaaaaagaagaataaagtggtagcagcctataacgcaactagagatactactcttatttttacattgccatacgataaaggatggtcagctaaacaaaatggaaaacctatccaaattcaacgtatccagaaaggattgatgggagttcgtgttccgaaaggatcaggaacagttactttaacatttgttcctcaaggtttcatagagggactcattgcatttttcgttggaattattctctttttcctctatgaatggagacaaataaaaagaagaaaactctaaggaatctaaccatcgttcacttataaataaaaggctaggataatgactatcctagcctttttcaaaacaaaaaaacacccaaatgggtgctatactagctccgccagtaggactcgaacctacgacatcatgattaacagtcatgcgctactaccaactgagctatggcggaatgagatatagtccgtacgggattcgaacccgtgttaccgccgtgaaaaggcggtgtcttaaccccttgaccaacggaccatatattcattaacagaacatatcccattatatcaaaatttaactaattgtcaagcactaaattctaaattttgctcttcaattaattttttggcacgtttgatattgcttcttgagattggacaagaatacccttctttcaacagcagctgtttctttttcttatccattccaatgatcatacttctattcacgataaaagattgatggggactgaaatatctctcctccacatctttctccaagacatctgataaacttcccgcaatttctttttgaaaatttttcccaactaagtttaatttataagccgaaccaacagtttcaatataaagaatatccttaaatggaatttttatctttttatccttaaagtcatactcaaaataatctgtcaaatcatcatttccaatttgaatagttgtcaggtactcaatacactcctttatttttaatctaaataaatcttcattcaaatttttatcaataaaatctaaggcagatactttataacgataggtaatcgaagcgaattctgattttgtagtaataaaaacaataatggcataaggatttgcttctcgtattttttgagcaatttccagcccacaatactcattgtcttggatatgaatatctagaaaatataattggtggatatccgaatgctggatataattttcaaattccgaaattttaccggtagaaatcacttcaagtttaatttctaattccttagcaatttctgcaatatgtttttctacccgtatctgttgagagagctcatcttctaataaaaaaatcttcattcttgttcgtatcctccaatcttcaaaacttgtaaaaaacgatttccttgcaattccgtttctaaaaacatcgttccataatttgctaagatttttctcacattatttaatcctagtcctctattttctccttttgtcgaatagccttcttcatatatttttctaatatcaaaagtgatttcatttgttgtattatgaatcactaagtaaacaatttttgaaatagagaaaatagcaatatgaactttcttttcttctgcttcttttgaagcttccaaagcgtttgtcactagaatcccaacgattctcacaatatctaataaatcaactggtagttgctcgattggttcactcgtttcaaaggtcatttccaccccagcatctcttgcatccaaccagcctcgaatcaaaatacttcgtaaagcagaatctttgatattgaccaagttgaatcctgataatgcttctgtattgatctctttataacctttttccaatacttctctatggattctctgtatttctggaatattttcttcctcaatggctaatgacatagaaataactagatttcccaaatcgtgacgaaatcccctaacaatagaatagagactttgaatttcagccatataccgactcatttgttgctcagaaaattctttatactccagttctaaatttttacgatactgatctcgctcgattttcatatggaatagactgactacaaaagagaaaaaacaaatcgttgccagcatactcccaaaatttttaaattgcgcttgttcacttatccataaggcaaaattgatcactacaaatatagcgaaatagaccgaaatcaatttctttacatacttttcaaattcttcttcataaaaaggagtaaaatcaaattcaaataagtcaattaacttcaaaatgattcctaaagaaagcaagcgaataaacatattatagacaatcgagtgagctgctacaacagcatctcctattactgaagagacaataatcgtcagaaaagttgctgttccttcaaccgctaaataagtaaaaaaagaataaaaaatggcgcacaagcgattcgtccgattggcataatgataataaggatataaataaaccggccataagagcatatttaaatcagagagtcgaatatttgaaaataaagtcacatctaaaaatactaagagactttcaaaaagaagaacaaaggtgctcagcagaaagataaatgcaaattgatgttcctgatagattttttcgtccactaatgcaaacgtcagaacaatgatccctcccaagagaaaagacaagattaatgactgaatcacacaaactctcccactttgttttttctattttattatactctagtattattataaaaaaataaaattttatatacaaaaaattataatataaaatagcctaaaattaaagggaatcggtaaaattgtaatgtttttaatgtttttgttacatgaatgaaaactattttacacaatttatataatctacactttgcactatatagggattgttagttatttttttaaatattcctaataaatcatttcattactatttgtctatagtgaagtatacaaaaattaatagataatgaaaatttatacatttttacataaaagaaaagatgcagcaaaagctgcatctctcatttgatcccagcaggattcgaacctgcgaccgttcgcttagaaggcgaatgctctatccagctgagctatgagaccgaacttacttcattttagcagaaaaaggaaggagcgtcaaggttatttatggtaaggactcccctgttgaatcatgaaagcacgatagatttgttccaccaacactaatttcatcaactgatgaggaagagttaattgaccaaagctcattaatagatttcctctttttttcacttcaggagacagaccaagactgcctccaataacaaaagtaaggtttgaataaccagatgtcataatctggtcaatcgtttgactaaatttctctgaaggaaattgttttccttcgatggctaatacaatcacatattccttatctgaaatcttagagagaattcgttccccctctttttcaaggatttgttgattttcgagttgactggcacgatctggagttttttcatcaactaactcaacctgttctacttttgcaaatcgaccaagccttttaatatactccgcgatcccatcttttaagtatttttcttttaattttccaacggttatcaatttaattttcattcccctattgtagcataattcttcaattccacaaataatccacagctatagaaaggaaatctattctaaaaagtcctttttaaagccatttctcaactaaattctacaagttatccacaatttgtggataactttagttatttaagatataattaagaaattttttttatactctagacaatttgatatccttaggaggaaaaaatgaaatcttcatctaatttactgaaaaaaattggaaacgtagccctcatttttgttgtaggttttctaggcgggattcttggaacctttttaaccttacaaacatctcattcttctacttcaaatactgaaagtaagcaagtccactcaaccactgttaaaacagcttataaaaatacaacctcaactagtgaggccgtagacaaggtgaaaaatgctgtagtttctgtgattacttattctgattcttcgaatcaagggttatttgaaaaagaagaaaactctgactcacaaatttctagtgaaggttctggggtcatttataaaaaagaaggaaaatatgcctaccttgttaccaacacccatgtgatcaatggtgctaaaaaagtagatattcttttagcagatgggaataaagtccccggagaagtagttgggtcagatgtctattctgatattgcagtcgttcgtattagtgcggataaagcaaaggcagtagctgaattcggagattcaaaccaattaacagtcggtgagactgcaattgcaattggtagccctcttggaacagattatgcgaattctgttacccaaggaattatttccagccaaggccgcaatgtgaaattgaaagccgataatggacaaaatatctctacacgcgccctacaaacagacgcagccatcaacccaggaaattctggaggcccattaatcaatattcaaggacaagtcatcgggattacctcaagtaaaatttcaaataacggacaaacgtcagtagaaggaatgggatttgcaattcctgcaaatgatgttgtcaatattatcaagcaactagaagaaaaaggaaaagtagttcgaccagctcttggaatccaaatgatggatttatccaacctttcaacttctgatttaagccaattaaaacttcctgaaaaaatctctggaggagtactagttcgttcaacacttgaaaatatgcctgcttcagataaattgcaacgttatgatgtcatcacaaagatcgatgatacagatatcgagtcaacagcagatttacaatccgccctctattctcaccaaatcaatgatacgatcaaggtcacattctatcgtgatggaaaacaacaaacaacttctatcaagttgacaaaatcaactgaggatctgagcgattaactttcactttcttgacatacttgtaaacacacctttacgaatttgtaaaggtgtgttattctattcataagatggaaaaattagaaaaaatagcggtaaaggacattcgaaccaatcctttccaaccaagaaaagtatttgatcaagaaaaattagaagaactggctcagtcaatcaaagaaaatggcttaattcaacccattattgtcagaaaatctccaataattggttttgaattgcttgcaggtgaaagacgttttagagcttcaaaaattgctggattagatcttgttcctgcgattattaaagagttaacggatcaagaaatgatgcgacaagccattattgaaaatcttcaacgagaagatctcaatccaattgaagaagctatctcctaccagaagctcgttgatcatggctataagcacgaccaaatcgctcaatttatggggaaatctagaccctatatcagcaatatgcttcgcttgttacatctagctccctctgttaaagaagcagtcattcaaaatgatatttcttcggctcacgcgcgtgttcttgttcctcttgatgaagaagagcagcgcttttggttggagcgaatcaaacaggatcgtttaaatgttcgaacattagaaagcaagatcagttcaaaaagaaaacagaaaaataaaaaagcaaaagagagcttcctactggaagaggaacagcgattgaaaaaaatattaggaacagatgtgacgatacactcctcttctcaaaataaaggaactatccaaatttctttttctagtcttgatgaataccaacgaattatcaacagcctcaaataaggctgttatttttattttttgtattgacaagcttttccaccataaaaatcttttgtaaatagcagaaaaataaggatattctctagttatccccactttgtggataacttttaaaaacaatgtgaatttaaatccacaacttgtggaaaagtttaaaactataatttaatttcatgaaatttagcctgtggaaaactatttttgtttgtggtagaataggagtacgtatgatttgatacaattcaagaaaaggagggaagtctgata

SEQ ID NO: 210 - DNA, 8225 bp, Streptococcus FBI02176
  source 1..8225: mol_type = genomic DNA
cttcgtttcgccccaaaatctacaccttcgtttgatttttttgaggcttcgccttagagcccttcggctctcggtcgcttcgctcccagagggcttgcgccctctttgttagcagtaaatccaacatttgtgatcttacgttttactttttgttttgaacgcaacacagctggcctataagagagtataaagctagagggtagatgatggctatttacactagatgaattctgtaatttagcttatgaagccaatagaaagccggctcaaagccgtccgcttttggtgtagatgaaatacgtaagttagcgaaagtaaagtgaaatggcagtagcaactcaatgtgtatttcatgtagcagttaaactagataaactgtataaattgcttaagtgcaaccaaaaaaacacatacttttactgaagtcacaagtagattatctatctgctaaaatcaagatcatctttctcaaatgttctatctccatcctctaattcgagatcttttctctggataatcttctcagcaatctcattacgttcttgatctgtcagataatactcttgatcctgcaactgatatttgtatttgtttctatcctcaatcatagaggtcaattctttagacaagttatcattttctttgattagactagccatttcttcttttagttttgcaatcgtagccctcagacgctttacaattcctaaaccaagaacatgatctttaaaatctttcaacaactgcatcagtggaccaggattagccctgcgggccaaatcatcgaaatctttctctgggaccataacatagcgctgttttgaattgcctagccctcgttctgcgattctatagttgcgcttatcgtcgattggcttatccgcgatcagctgcatcttcagcatcgcatcgactgttgcatcttcgatcatttcgagatcaagttcttcagatttgctcactatctcatcgttaatccgcttaatctctctagcttgttgccttttactagcctcaaaagcctcttctcgcttttgaaatttttcttcttgttgtctcaatcgctcgtttaactcattcatcttttcttcgtgagcttgttcttctcgctggatcttaacaatctgacttgatcttcgattctcaatatattccatcgcgtctttatattcgcgcatatccttgatatcgttggtttgcccagcttttcggtcgattccgatttcatggacaaactcatgcagacgatgaatttctgcatctctaaacgctttgaactgctccctcccagatgggccgaagccttcctgttccagagcctttctaaacgatggttgcacagcaagcccatttttgtatccagttgccgttgggaccacgttaaaatgggcgtgaggggccccagcttcgtctaaatgaacgacagcattatagatggtcatattactatgtcgttcgttaaaatcgcggacataacgttctagagcctctcccacttctcgtttttcttcaaaactcaatctttcccaatcagctttgtttccgacggtcacgatgaattccctctgaaggtccaaatttttggatttctggacgtgtttatagtagtcatcaattttgcgatctttccgcttttgctttgcgttgtaagtattcagcgcatcatcaaagagttcgtgataaacgtcttttatatcacgtttgaaaatctgaatattgtattttgatttttcacgttcgatatgcttgtgagcgtcgctcataaactctttttccgtcagttcgcgattgttgtgtcgaatattagtttgtcttggattagttttgaaggataatgtcattgttttattcatgatttaaacctaccttttaagatttactattttaagagttactaatagtatgccatcttttgttaaaaaaaaagacaaaacagaagaaaaaacgcaacactcaaagaatttaactaggctaataatctagttaataaaaatatggatagatatagagatccatgttttgtccatttcgtgggtttatatataagtccatgaaaaatacaaataatggtctacatagttgtccatgatttgagtagaaaatggactatatataggaccatgaaaatatagaataatgggatatatagtagaccacgaaatgataaaatcatggaacatgtataagtccattatttatataaaagatggacaacatataggcccattattgggcttaaacgtggtccagtatataaaaccattaaccaacttaaaaaatgcgcaaggtagcccgaaaagcgggctaagatgcagcgctatcgctatcctgcgtctatattgtcgatttaaaacagacgtaaaaatcataatccaaagtcgggatttagcggggcgtttctgttactctttaccaaagagtaacgtttttgcacctttgacatcgcttcgcgacgtacaaaggtaaaacgctctgccgagggccatgggttgcaccccttttttggcccatcatggtccaaaaaattcactgcgtttttcggcccacaaagtggactcgaaaaaattcggcgcgaacaacgcaccgaaaaaattgccccctgcaatttttgcttgcccatcttttgctaacaaaataatttcagctgcgctaaaattatcagcaaaaatggtcttcgcccgtcgcacgaaccagcgtgcgatttgtccgtgaatcacgcagacaaaaaaagagagcttgtaactccctaccatcattattttaactaggctattactgtagttagtgtttgcgattcgacatatattcctcatatgagacttccaatggctcataaatcgagatagtgttgagctcaattattggttgtttcgtatcgtttctttttttccgttttgctgtattatccaatgacatatttgaagcatcgttatcaatcatcactaaattattaagcgacacatgacttcgtttatccttttcatgatcgtaataattaagacgataactgctaccagtccgcgaagaaactcggacagctctatctccatcatatttagatagcagttcaattgctgtatcatacttttcggataactcttttagcgttgattcgtgtctttcaacttcaaaatcttgagatgcagccaacttttctaactcttctgcgtcagttgttttatttttggcaagatgtaattcttgcagaatgacacgatgttcgctcatctctttctcagtacttttgttataaattctataaagcagctcaagacacttttcaattgacgttgtattcgtatgtttagaatctttgatggataaagagagagacgatgcagagcgcaatcggctacggccaattgtgatagcattgtttgaatgaccttcgtttgcgtttttttctaacgcaaatacctctttttctagttgatccaggacagcagtaggagcaataacgatatacttgctaccagagacaattttaccgttattcatttcagctagcggtttttcgtatacaacatattcgttacgtttcctcatcaagtcgtcaaattctttgtacatttcggacaaattcattttttcttaccttctttctgactaactttttaagctagttttttcttacgaaagtagtatgccatctttttgcgaaaaaacgccttttttttacaaaaaacaactttccgaaaaattgatctttttcggaaagttgaacaataagcaaaaaaacagccccaacggttggggctgtaagtaattttagcgatagattgtccgccctctaaactgaaatcagctcagaatgactatctcagcatcattttttgacaatttatgcaaaaaaattatcattgagaaaaaacagtttgaaaaaatcgtcttttttgtgtataatatacacaaaaaagaagaggtgatttaaatggctattacaactacaaaagcaagattgaatctaagtattgactctgaattaaaacaggaagttggtgaggtcttaaacgagattggacttgactatactacagcaattaatttatatttcaataaaatcagacgtgatcgtaaaattccatttgaacttgaagcacgaaaaaatttaactgtcgatgaatttcttggttcaaattggcgtgaaggtttggaaaatgtagaggatggttgggattgagttataaagttgaattgatacctgaagcacaagatgatttttataaattagataatagtcaacgtcttcatgttaaaaagtcacttatcaagttagaaaatcaagggatgcttgctggagaggctcttcacggtaatttagcaggttacaggaagttaaaacacaaaaaactgggcctgagaattgtttttcatgaaactgtcaatgcaattgaaattattgaagtcattgctattggtaagagaagtgataacgaaatttatacaatttctgaaaaacgtataagaaacagatgaagctattttaaccaacctacataaaagaaagaaacacctactaacatattcaagaaattaaaagtaaatgagataagaaaactggaactactttcacatataaaaaaatgaaaattcattcaaattaaagtataataaaataagaacaagttgttactaaagataaaatttttagaataaaaaattaccgtaactaattaatatttatataagaaagtggatgattccaatgtgcaaactataattatcaattcttaatatccaattttgttatgaaatctcggtaggtgattaacatgaaaaaaatactatttactctattatttagttgtttagcattattttgtctccctatttctgtaagcgctgacactactggtgacctcaccgtaaaattcaatgaattacaatttactgttgaggattataatgttcctaatccagaagtgatctattcaaaatcaggggtcacagaagttgcgactgttattgatcgcgatactggaaaagttgttgaaactattgaacttatcccagacctttctcgctctacaattacttcacatacattgataagaagtgcaacatttgctagaactacacttcaattaagtgtaaatattgagctatataataatggttctttccgtcaaattaactcagttaaaggttattacctaggaataacaaattttattgcaaacacatttattgaagggaaaaatgttaatgtttggtctccaaatggataccctacaacaagtataaagtatgcttataatggtactttaacagcagttatagacagtaatgcttcaggtcaaattaaagcagagttgttaggagctggttttaattttggaggtagtattggaggcaaaacttattatagagtcccatttaatcaaaacggaactattagtctatactaacttaggagataatcgatattatgaatgaaaaaaaacgtacatattttatttgtgcaagtattattatttcatctataattttaggactctttatttattacggaatttataacggatttgacgttttgggtcaatttatacacgatggcctcaggataattagtaataatcttaatactactagtagtattaactagtagtattaggtagttaatagtaatagaatttaaataaaaaacggtaatttagtgaatgctgattgccgttttttgattgctaattccaataaccattgatagtgtaaaaaagaatgtaaatgtttaacaaaagatttgacaaatggtttgtaccgaaaaagtcagattggttttaggaaattattcaaagaaaattaaagctacgttgaaacatgatgatattgggggcatcaaatctttcttcttttaagttttacaaaacaacatttcaatatgttctaccaattgaaggctattttttagaaaacaaccgttgccaccagctttttttagtttctaacaataatgtttcatttttcatcgtgagagctccaataagctgcagctggctgttgcttgtttcgatcatgtcagcaatctgcttgtctttttgatcgatttgatcgactagttgagtgcgttcacgctcaaaatcctcacgtaattgatcgatttgatcttgtagcatcttttctacacgttcgctagaatgcgctacactctctacaactgtatcgacatcttctacaaggcatgcatctaaaacatattgcgtcaggcttttattctgctttttcgccaactccacaagcttttctttttgctcttttgatacacgcatgctgatttgtacactcatttatctcacctatttttcatctattatatacgctatacataacgttatgtatatcaattatatcacgttctatacattttctgtacaactatttcattaaaatcgattctaagctctcatttccttatcaatagctatagaaaatgaatttaaatgatctggtagggtaaatataccacccccaccttttaggttcttaaaacgcattatataacgttaaaaagcgacataagaaaaaagcatggtttattcaaccgtgctttcgtctgttttatagtctataactaggctattagactagttagaattttcttccgaaatagtaaccgactacaaaagcagctgaaaagaacaacatacgcaatctcctttttatttattttaacactatagtatcattaaaagcacagatagtaaagccctttcagagtctaaaaagatgttctataggttcttttaaaactttagctaattttaaagctatttctacggatggtattgttttactattttctattaagcctatcatttgccttgaagtatttatttttttagctaattcttcctgtgtcaacccctctctaactctaaaatgctttatattgttttgataattatttttttctgacaccctggcacctctttccataatcatttattagttctgttctttcattatttcttatacggttctgcgttatttaattgttttaataactcgtcctttcgtttgtttagacgctctaattcgtcctcgtctttagcgtctgaaattgcaagacagacctgtttgtactcttccagcaccagctttttatcttctgttgtctcgttcttgtaatcagggtttacccattcaggaacgtttgtcttgcttgtctttttgtttgattttgctttattagactttttcggttctggttttggtctattaaacttgtctggatcatacgttccagtcacttcttttttccaagtaaattcatatcctaaaactggatttccacgcttttttgacttgatttttttaacttttaaatcctcaaaatagggagacaactgttttaaaatcggagtgatgaccgctctatcgatttcgcttgatttatagctacttggcatatctaacaaaagtttaaattcatcaatcttgaactcttttcgtccaaccgttcgccactgtttcagcagtctgtaagcagtttttgcataagtggagcgaatagaagtaaactcttgtagctcgtattgagtaaaatttgctgataacttattcaaaatatactcaaaaagaggggatacagaaacttgggcttgcatgtctgacaaatcatcttcccattcaactttgaaacgtgtaaaaagtggcatgtattcaatagaattctttgttttctcgatgtatcttaattgagagatgttatttgctagactgtccattgtgtcgtaaaatcgcttattgtgttggatagaatagtttgccaattctgccagttgatgtttatcaaaaataaggtcagaagtgcctttgtctcttgcttttgtaataatcgcaaaaaagaaattcatctcttctgctgtccattttctcatgataaccgtgtttaaatcattgtgatgcttaactacttcattagccattaagaactccttttcatttcttcttaattataccaccaaaaactttataaagcaaatatttatatttgttcttaataaaccgacatttctacacccataaaccgacatttctacacccataaaccgacatttctacacccataaaccgacatttctacacccataaaccgacatttctacacccataaaccgacatttctacacccataaaactcgaaaacccttgggactctaagatccgcggaggtgttaaatatattattaaacatatatataaaatatatataaataagggtctca

SEQ ID NO: 211 - DNA, 3675 bp, Streptococcus FBI02176
  source 1..3675: mol_type = genomic DNA
atgaaaaaaagattgacaataactcttagtgattcggtgcttgaaaatcttgaaaaaatggcaaaagaattagggttatcaaaatcaggaatgatttctgtcgctctagaaaattacaagaaaggtcaagaaaaataaaaaaagagccactgcaatggctctaaagcaaaatatttcttgggttaattataccgtatggcaaaagaaaaagcaagatatttcactttcctactctatcccgattcaatcccagaagattgggaaatgagattggaattgattggtgtaccaatggcggtcagtcctttgcatgataaggacttgagtgatgttgagggacaactctacaaaaaagcacattatcatgtgatttatgtggcgaaaaatcctgtgactgctgatagcgtaagggttaggataaaaagggctttaggagaacaaagtgttgctttggttcagatagttctgaatatcgaaaacacgtatttgtatctaacgcatgagtccaaagatgctatcaagaagaacaagtacaagtacgataaggcagatattaagcatatcaataactttgatattgaccgttatgtgacgttagatgctgaacaaaaagatgatattctagacgaggtctgcaatattattgcagatcatcggctagcgaatatcttggaattgaaaaattttgtaatggcaaaaggttcagagtatggactgccgaatatgaaagttatcaattcggttctgcgctctcatactggattgattcgattgtattttgacggagtttatcaagagcgaaagtatgggaatttagttacgtcagtagattatgaaactggggaagttttgagcgaggaagaataaaaagcagacctttcgaggtcggctttttttggtcggacaatagcgaagccgtccgactgtcattttgaaaaaatgactttgggggacttatcgaagtcacccaatttttcaaaaaatgaccttgcgattcgagggctttttttgtagttcgccctggcataaagtgggcggactagctctctgcaagagccttcggagaacgcacttttacgaagtaaagtatagtgcgttatactttacatggaagttagccgaaatttgtgctaaaattctagctagaatgttatcacaatagacgagcaataggcttgccggctcgtctgtcattcgctactcgaatgacccacctgaggaggtaaaagttatgagctacatggttgcgagaatgcagaaaatgaaagttgggaatttgggtggcgcacataagcacaatgaacggatttttgaaaagcactcaaacaaagacatcgacacgagcaggtcacacctcaactatgagttgacggatcgtgaccgctctgtgtcgtatgaacggcaaattaaggactatgtgaacgagaacaagagttctaaacgtgggatacggaaagacgctgttttgtgtgatgaatggattattacgtcagataaagatttttttgaaaagttgggccaggagcagacgagaaaattttttgaaacggctaaaaactacttcgcggagaattacggagaaaccaacgttgcttatgccagcgtacatcttgatgagagtaccccacacatgcacttagggattgtgccaatgagaaatggtaagctgtcatcaaaggttatgtttaaccgtgaggagctaaagcatattcaggaagatttgccaaggtacatgaatgagcatggttttgagttacaacgtggaaagcgagatagcaaagaacagcatttgagtgtggcggactacaaggaaaaaatggggcgtgaagctcttaatcaggaattgctagatttaggagcgccaaaatattggcatacggaagaacgtagacctgcaacaatgtcagaaattcaagattatgaggacataggttctttgtttgcagattcagacgtgacatttaacatccgagaagcgacgttggaagagcgtttcaaatggctagacactcatagaaacgatttaagggcagatttaggacgtttagagggtgtccttgagaaaaagattgacgaatacggtaaaatcgattctgaggcttctgagaggctctcagagctatctgagttaaattctgaggtaaatagtcgtcaggaggaaataaaggggttaaaaagcgattctaagcgtctgagcgatgatgtggttcgtctggagagagctcatagagaaaaaacgcaacttttggtggaacaatcaagtaacttatcgaaaatttcgtatagagatttagatagacgtcgagttgccaaagagttgcaggaagaattagaaaatgctactcctaaactgtttggcgatggctttaattttacttcggattttgttggacgactgaagacgtttgtgtctgatgttgtagagaagctggagcaggcggtcaatcaaaatgagttacttagaaatgcactagcaggcatgaaagaagcaaagagtaggcttgaaaatagtctatctcatgcagaatggaaaaatcagaaattagagactgaaaacaaagcattaaagctagaaaacagggagttgaaagtttctaaaaatctcttagatgacctttctgaagtcataacagaaaaagaagtaaccagtctcaataagcgtttagaaaacttaagacagacacgagaactgtctaggaaaagacatgagcctacaaaagggcggagtatctgagcgatttatgccgtgaaagctatttgacaataagctaggtcaagttagactggttaaggcggttcagtctgaactttgttcagctgaccgacaaaccaaagactaacgacctaggttccttgttgtcaaatagaccatggaataaagtaagcggacatggtataatagcaatattctggcactaagccttcgaaaggaggtgtttagcttgttagaactcattactcttcttgttgttgtccgagtagtgttgcccttagcgtacgagttggggaaagcctatgggatgaagtggattgaaaagcgcttcgatgacaacgagaaatagtgtcacttttcacgaacgctagtgtgttgtagctagcgcaaaaaaagcaccctaagtcttggcggacagggtgcttttcgtttagcgtgatgaactcactactcttgttgttgattaaattataacatagttttataatgggtgtcaaaaatagacatttgtgatataatcaaattgaggcgcctcagcgatacggtcggtggcgtgaatctctttataggtcgggcaactggaaacggatagctcaaagggcactattttgtgtcgggtgtgggactgccttcagcttcgagctgtaaagaccccggatgcatttttaagagattggcccgatagggtcttttttttatttcttgggtggagaaaatggggtgattttttcgtagaaaaaatctaaaatcgggggggctactacgaccccccttttaagtgccgagtgccaaattaagaaaaaaagtgccttgaaccttagaaccacaagggtttgaggggtgcgagtttgcggcgacattttggcgagttttttggcgagtttttaaaaataatactaaaaatgttgcattaaatacgcacttgtgttactattattttataaaattttgagaggtaattc
